United States Patent Application Publication US 2008/0039413 A1 - sequence listing, part 23

SEQ ID NO: 3078 - DNA, 75733 bp, Mus musculus
  misc_feature (1)...(75733): n = A, C, G, or T/U
ccgccgccgccgcgcccgtcatggacgtccgcctgtatccctcggcgcccgcggtaggtgccgcccggggccgagccggccggcatggcacacctggactactaccactgcggcaaggtaggcggcaaggtaggctgggggcccgagtgtcccgggctggagcgtggggggcaggagtaatctcgtggctgcggacgtaggcactctgggggcgcacacggggacacgcacacaacatcttggacgacgggcacgtgccactcacaccgctaccctcgcggtcggtcacacatgctgggagttgtagatcacgggcagaagtcagcccgacagcttcccgtaagacgacacagtgacacactcacccacgcttcgcattcattcacaagccgacgcgcagcgactctctgtcacccagccaggcggcaccacacacagccttcgccgtcccacataagtcacggtgccagtcatttatcctcaaccacacgcagccactcgcccacgcacagggctacgataacatacaagtcacctcatctatctacactcatacacaacgcttccacacaggttcgcagctgctgtcacatccagtggcaacgggggacagtcacacaaagaagtagctccgacagtcacagctcagactcacaatgacccacaagtgtacacgttcggtcacgcagatccatcccctggaggagaagccccagctacaaatcgccctgacggccacctagtcacacccggacacacccagggacagtcacaggctccagcaccctccactgctcgcccccacccctcggttgtccacactcgcgcgtcggggttttaacttctcggcgctgagcattaattgggccgtttactaattggccgtcactaccccgtggcgcctctgattttatgccggtgtcgtccaatcaaggcctatcccttccctggattggggagctagcgtccctccaggctggagccgcagcgaggaggtacactctcgctccccgtccccaccatttttctaggttctctgtgctcaactccagccagggccccacagcgcggcgcccccgggaggtagtgcctggatcccaggaccaggggcatcggaccccagctcccctttgagctcagcgggcacggtcaggggcagcggcgctgtctgagtccccttccctcgcagggaagggaactttgaaacttagttcggacgccagacggtcggtgcgtccccgggtctgtgcgtcggtcggggtcaggctggagccgagcgcggcttttcgtcactcggagcccggattgaacagcgcgcgtgggtctccgggcggtcgggacgtagacgcgcgggctccgcggcgctgcgtggtgagtgcgcgtcgggtggctggatccatgaccctctgggggtctgtcccttccctacaggctgtccgcgcagcccctggctgcggggatgttgtcgggatgctgcagcagccgagcgtccggccgatcgctgggcctccggggctgggcctctctgcaagtgcatcctcaggccctaagggagcggctgcggccgggagccctctgcagttcgccctggtccgggcggcgcgggccacgcaggccggggcgtcccggggcggaggtgggcggcgcgcatctctcggagtggggggggggggggggaagagcagattatcttttgtgcgctgatccgcaaagttggaagcctgagaggggggatggtgccttagagagaaggcgggttccggagtcgcttccagtgtggtggtgggaaaatggattaaaaccagcaagtggagttttaccagaagctgaaggatggggcggcaggtcatcttctgcccttggctttgtttaaaatatcgaatgggcaaaacggggttcaccctctggtttggtggccgcggtggagattggggatttatgccttaaagtctgggtacccaggctgggggcggggcagggtagctggaagaggtctttgggaagtgatgtatctgcaagcgccaccagagtggggcctgtctcccgccgccgcctttgggaagtaggacgctgccgacccccaccccccaaccccaaacccccacccccatccccgctaccgccacctctttattcggaagctctagaaacctctgactcagcaccagaacctccgaggttgcaacctgctgggaagggcacagaagtggagggtggagattttggtttctatctgtgcactaagaccctggcctgcagctgaggaagttttgaggatagtggggtgggaaaagccaccagaatgctggaaaggaaggtgcagagcatgggtttagatgtgagacccgcaggttcagcccttcaggctggggtgatggggcacctggctcagcctgaatccagattcctgttgacagattccccagtgtgctgtggccttccgtggtgttcttgaggttcactgtgaccaggaactccaccccccgtttttttttttttttttttttttgtctgacaccagaaactgatgattgtggaaaagaaaatgtccaggtttcttacagaggctcactatcagagttggagacctaaggtgtaatagccactctgtgtgtgtgtgtgtgtgtgtgtgtgtgtgtgtgtgtgtgtgtgcgcgcgcgcgcctgtgttgggaggtgctgtaaaataggttatagagccaggacacagcccacacactggggactctgttcctggagccaggacaagaggcttgtctctcaagcatttgcccaaacgatgtcagacaaccgtggggcagttgacctggaagggcccttggcgacggtccccttggcgaccatccccttggtgactgtcccttagcaatcctccacatagagattcccagcctctttaaatcaaagtcatgagcactagctgctctcttctgctgggttttgtttgagcaaacacacaatgataaaaagccactgagcttcattttagcttcaaaatacttgtgtaatttattaattacagcaatgttagcatgcatgagaaaaaattgtctagtaggtataaagcaagcacgttattctttttaaaaagaaaatgtagtaactgtttggtaagcaccggggctcctggcttctggcatggaggatctggggtcccgtgatctctgcttcacggcaacacggcaaaagtcagtcatggagtagcaggtgaaagtcagagatgagactgaatccaagtttctcaattcacagcaggacagcagtccagcctccttgtgaatctctctctgtcgtgcttttgggactgggaaatctatgtttcatccacggaggattgaatttcttccattcagactttggaaggctgggagctcccagctcagccaaaacagactggtaccaagaggtcactgggacagggcgaacctggcttcatagctccatatgtggctttgcgagctaaagaagatgattttctagctcctttaaaaaaaattacaatgcatgcatgtgcagtcgttcaagtcagagagcaaccggaggctctctcctttccactgtgtgtgtcccagacgtccaaggtttggcaacaggtccctttacctgctaagtcgcctgtaggctttctagctctctgttaacacagagtatgatctaacagaataaaatgtaaatgagcttggttagctataaacacccatgaacccactaatccagtctaggtagagaatatttccattacccccagaaaggcccttgttcccttcctagtgagcaccctacctttgccccagcagcaatttcttaccgggtttctattccccacctttttttttttccggatcattttaggactgtgaactctacatgagccccagtgtgttacatacagcatgggcatttagagtatggcttcttttctttcttttctttcttttcttttctttcttttcttttcttttttttttttagctcaatctgttttttgcattcatcttttgtgtgtgtgtgtgtgtgtgtgtgtttgtgtgttgttccactttgtcactgagtgatattgcatcgtgtaaatataatacaactggtcactttatctgtggatgggcatttgggtttgtttccagtttggggaaattgtaaataaagctactgtgaatgtccgtctacaagtcttctttcaaggggaacaaattgtctattatcactgagccttggtaccctctttacagttttttttctgtaagatttatttatttttgttttatgactgtgggtattttgcctgcctgtatgcatgtgcaggatgagcatgcagtacccatcaagcccagaagagggcatcagatccccctggaactggagttaacagatggttgtgagccccagcatgggtgatggaaaggaaacctgggtcctttagagaagcagtcagtgctccaggctgaccctcattcccaccatgtaccctctggaggacattgcctacttctgcgattcaggacacaggcgtgagggatgcagaatagaaaagttcttggtggtaatattaaaaaagaactaggaaagttcttggtggtaatattaactgcctaccacctactccagcaagaggcttaacctctctgttctagcatccttttatccctatttgatacacactaaaggccaacctgggtggctctccctgtggagcacgctgtggccaacaacatctctctttctccaggatctctcaataactagtaatgcttgggatatgggatgttctaccatctgtcaatcaacaaatatttattaatcactgttttgtgctagaccttttctaggtaaccagtggtatgacaatgaacaaattgttgctttcaaagcttatctgtctgtctgtctgtctgtctatggataaaatacagtattatgattaatagatctctagatattttctggatatgaactagggaagagggtttagatgagacaagctctgtggctgctttgcaatgtgtgtgtgtgtgtgtgtgtgtgtgtgtgtgtttgccctagtgtgtgcacatgtggaggtcaaaaattgacacactggatgttgtcgtagctagggttagtgtttgtcaatgttgtacacagacctcagaagacgcactctcagttgaggaattgattctatgagattggcccgtggttgtgtctgctggagtattttctcaagtgctgattgactcagtagggtccagcccactgtgggcagtgctatctctaggcaggtgggtctggagcagctctttaagaaagctgtctgagcaagccaactggaaaagagccgataaacagggtttctgcttcagttcttagccccagcttcctgccctggcttctctcagtgaggggctgtaagctgtaagctaaataaacctttccctcctcaggctgcttttgatcgtggtgtttaccatagcaacagaaagcacaattgaacaggtgtcttcctttatgtatattaagaccagtttctcctcgagcctggaactcaacacttgagctagactggctggccaacagtcttctaggacccacctggctccagcccaccagcactggattataggcgtacgcctccatgcctggcttttactggggtctggggatccaaacgtgggtgtgtgcttaggctgcaagccctcccccagccggttttgcagttttaaaatggaaggttagtagcaggcctctgaaattttgaaaatttatgtacacagtaagagtcgcttgatgtttttttcaaagcgttattatcttattcatgtgtatgtctgtatgcctgtatgaacacatgtatacagttgcctgtggaggccaggagagggtattggatcctctagagctagagttgtgggcatttgtgggcctgtgggtgctgggacctgaagtctggctctctgcaagagcagagagagagatcttagccacagagacaaacggatcgcaagcttctgatctggtaagttttgaaaagcagcttccagagccacactcccagggatttcatttcctttggtcctggtgagtgggccctgaggatctgtttgtctcatgagcccccacgtgatgctacagctggtcacatgttagaggccatagtttgtgtagtgggggcttgcttgtttgcgtacagttttgagtgggctcctggcaggcaggaaccacgctcagcgcttggcacagtgccttctcataatggctcggtgagtaagtggtagtgggtgaattattttgctcaccacccacatagctctgggtatagcaccgggtaagcatgggaactaggaaagcttggttactaaacggctggaggctccctttggcacaaaccacgaagtggaggttacttcccttggtggtttgtgtatgctccgcccagggagtggcactattagaaggtgtggcctgttggagtaggtgtggtcttgttggagtaggtgtgtcactgtgaatgtgggctttaagaccctcttcctagctgcctggtattctgctagcagccttcagataaaaatatagaactctcagttctgcctgcaccatgactgcctagatgctgctgtgttcccaccttgatgataatggactgaacctctgaacctgtaagccaggcccaattaaatgttctttataagacttgccttggtcatggtggtctgttcacagcggtgaaacactaactaagacacttcctatcttggacttggggtgcatgagtcctttacaacatatgtgtgtgtgtgggggggtgagatttgcatggctttcttctgcagggtcccatgggaggagccctgggctggctggaattaagaggttctatcaggaggccagattctttgccagggagctttttacttccggacttagagtttcttttgctgtgaagaggcaccatgaccacagcaactccaataaagggaaacagatcattggggctggcttacagttcagaggttcagtcattatcatcatggtgaggcatagctgcatgcaggcagacacggtgctggaggagccaacgggttctacatactgatcagcaggcagcagaagggagccgtgagccatgctgggcgtagcttgcgcatatgagaactcaaagcccgcctccacagtgacacacttcttatagcaaggccacacctattccaacaaggccgtgcctcctaatagtgctactctctataagccaagcattcaaacacacgagtctatgggggccattcctattcaaacggttacactgaccctctagtcctgcatcctgtttgccagagggtcctctcagatcaagcttctgtgtcaggagcatcagtccaggctgccgctgctcacttcagtctcctgagtgactttgaacatgtcactagctttctctgggtttctgctcctctgtgtacaaaggggaatcgaatcagcaaccatcacccctccaagacagtgtggtgtgaggtattacgaagtgaaagcctggggtgccttgtatgattgtggcacatgggaggatcctccaccaggatgatgctttttgaagagtgtattagcttgcttttcattgctataacaaaatacctgagacaggctaaccttgtgaggggttatcatgggtttcaggccagcctctgccgcataaacaaactcggtttcaataataaaaaaataaactggaagctaaaagatttaaagaaaataaaggggtagatttagcctataatcttgtagaacacagcataggttctgaatgctgcctcacctcatgggtaaagacactggtagccagaacagatgtggggacaactatcagatttcattttaagccagagccacagggtagggagaagcaaggcttgctgctgttaaaacatgtctcctgagaacttctgagggtcctagagaccaacagctcaactacagtgaagaactcccactggaccttctgagggggtcttaagatgttgtccctgggataagagaggactcttgtgtttcagagtgggcctggcagataagtgatcagcagacatttgctcttgacatgagtgaatgaatgaactgggggagggctgcccagtgagcacctggagtctagaacaggactagggccatggccaagagtctttgagtgatgggggaccagcctgtgcctggtaggagcagtggagaagccaactctgtgcacactgcacaggttcccacagatgctctgctgggtggctgcctgttgtctccgtgggtcgtctctttcacttccgtaacttcttagagtcccaggattgatgtctagtgtggatcatctgtggaatgcagtgggcctgggattacggcatgctggtagcacgggtgggttatccagtggtccagtctcttcctctgtcagatggcaaatcagcatctcccccagggaggagggtcagcgatcacagtatccagtacagatagacacactttcgtttccatttgctaagaacagtgcactagagttcaatgttagaaatcagctcttgcccactcggaagtgtggggcgtggctttcctaccaacatctttccctcctttaggaggtggggcggggtgtgcttggaatattcattgggcttggtctggtgaccttgggcacacaatttagccaccttaggcccgttttcttggatgcgcatgagctttggtatgaggtatacaactccaagatgaagctgacattattgtcccctacctcaagctgcagtgtcaggtctgggtccacactctgccccatcaggaatactctttagtaggaatgttcttacccagtgctacagcctacagcggatgctgagtggggtccctatctgagacagctatagctccagagctgggtagcttccatcattcacatctatgaccaacttcttcctctgcccaacctcgtgtccctctccctatgggtgtaccctatggccccaatcgtccctcaacataaatcttccatgggcgactctttggatcagattatgttttcatgaaaagcaggtaaccccaaggtgaggaaaactcctcagaagctatcaggaatttcaggaggccgcctgactgcccaggttgggactatgtaccccaggctatatgatatccccatgtccagagaagacagatgacgttctccccagtctctgaccagcaagactggccccgtcctcttgtcagcagcacaagcttccagctgcttcccacgttaattaactaaacttgagatggagcccagtgatcaggatagcggtgccatctagccactgggccagtgtttgagaggcacatgctcctggcacatggggggagatcaaacacaagccattgagctttcctgccatcacaagaccaagaaaccatcatagagactgggtcagaatttgggagagtgacgcctctgtccctctatacccacacacactcaaaccaagtaggctagtgtgtagcatatgggtgtccttgctcccctgaaggcaggcctcaccacgggggtggacagatcccctgaggttcttttccctctgcctggtacacccccaccctgtatatgctccatgccccccacttagctccccttccatttaagactcacctgtgtgacactttacggaaggccaagcaactgtcactgcccctgacaactctgtgtgtgatccttggtctacattctgagtcagtagatagcagatttacacggtctttcatctggtaaattcaactttctcactgagttacagaacattcaggattgggctgaattcccagcatcaagcacatagtaggcactctacaaaaacccattgtaccctccccctcccagaaacccagccgcaggcactgtgcgaccacaatcttcctgctccctctagaaggcagcagaaatcccagtcacaccgtagcaagttttaagcatcaaggtaattgatcaaaatttatcaccctgtgctacacaacatcttcttgctaagatataaaattatcatttaccatgactcattaagttaataattacagaccatatgcttttattgcttctcccaatccaaggtgataaatcaccctgtgggtttgggtctgtgtaaatacaatgactgccaactgagcagatacgggatttacagacaggaacacataggacagaaatactgaactgaaaacacagccccgtgatcctgccagcccctcccagtgtctctgagttcccaggctcgtgtttctccaccagggcacagttttaaaatatgcttggttgtcatagcttttcagaggtggtgcttctggcatctaacaggtgggggccagggatgctacttctagtcttacaatgcacagggatagctccgtatatgatcaggtccagcgtgcctggtgtgctgggttagggaaccagtgttatggaccagcagcgacttccactgtgactcttaatttgcatctgtggtcacttctaccatgcatattcttttcatctgagcttcacagcaaaaacataaggcgttgctgtctttagctgtaggctggaccaagccactgatcaaaggcttcaggctgatgcatggaccacttcatttgctctgtcctcagcctcttctgctgctcttgggactttacagagtttggcaaggatagcttttctagtgactgtgggttccatggttcttagggctcccgggctgtgttgtcagtctctcctttggcttttttatttccagcagtgtctcagtgtctctcatggctgcccccttccagttgccccctgggttcttatggactgatcaaatttccccatacatggatctgtatgtgaattgtgaatatttatgcattatgaatgtgtgtgtattgagagggttggttttttttatctctttgtcatccttttggggtttagaagcaaggtgagaatgtgaaagtaagtttagtagctgcccaaagcatctagttcctgttatttcgagttttgtttgaatttttgtggaatttcaaagggaaatgtagggtagaaataagcctagatggccctttgccatttgtaggtgaagactggcccaaatggctagagtaccaggtggcagagtaaccaggatttgtccttatatctgtgggtgacctccacacgaagctgcctcctaagaggtgtgtgcatgtgtgttcaccttcctgtgtatccatacatgcgagtgtgcaaggggcctgtgtgctgcttgcctcttgcttttcctcttggagaacttgctcttgtgggggtctggcatctccagctgggcctcctgccttaggcctcaacttcagggctcatttgccagtaggtcggctgcatattacagctaattaaagcatgcttatcttgaagttgggtctcattttcagaatgattcaaaaacttgttggaagtgattctgattccatagttaaccccaggtcaatctcatgcataaatcttactactgcagtgagctgtgtttcggctagacctggactttctggagaggaaggtaagaccccagacttcagggcttgtttctttattctgaaaacatttgctgatggctccatgggtgatttcagggggccctgtgcttcctatgttcttcccatccacctgagaggtgagttaacttttaatgtggagccagatggtcacacatcagatgattcacaccttggcgctttagatgctgggtgaccttgaacctgtttcccagcctctctagacttatttttcctaatgccacactctgacctcatgtgggtgttaaggtcagatcagttgttttctagcttatccctgctacttggggctgctcaggacacttggaccttaggagagcagcgagtagcacctccatctgtcaaggagtttacatcttcaatagagaataggagaagcctgcttttcactatagctcccccaggaagcctcttggagtcaatcacactgtcagacttaactcaggagcccaacctgggagagacacctgacacaagtgtcctggaagcgtttggaatgggagccacagcctgttcctctccacgggaggtgctcttgcagctctctgtccctgcaggcccagcgatggtaggaccagactctcctctgtgccatcccctccctccttctgtattttagtccaggcagtgcggaggaacaagtgcatcccggcaagtggtttgagagctgccttgtcctcaaagctgtttctctacagcagccacatgtccctcagctgtcaggctccccacaggggacattgcagtgtaattgtcactgtgctcaggaaatcctaaagtatggctactttatcagctattactacatctgtacatagtttctctctgtctaggtgaaagtcattagacagagtaattgggttgtgtgtgtgtgtgtgtgtgtgtgtgttttgtgtgtgtgtgtatgtttgcttgtttttaccatagagcacatcggctgagaatgagccaggagcatcttacctccagcaggtttgcagtcagttcacaggataggaatctcttgcagcaggaggtcctgatgctgattctttactcattcacccaagggtagtggtgtgtgtgtgtgtatgtgtgtgtgtgtacactagcatgcacatatgtgtgtggggttacaggacatgtgagtatgtggaagccagagaacaacattgggtgtcttccttagttgctttccagcttatcttttgagacagggtccctcactgaatctggatctagactagctggtcagaaagtctcggggttccctcctgttccccactcctctgtgttgggattgaaggtttccctggctctgcatgggtgctaggaattgaactccggtccttacacttgcatggcaggtgctttaacccaaagccaccccagtgtcatttgggggttaaatggaagtcctcaggatgctgacactacgttatatcctgtgaatttttctggttgagttctataagacatacatacatgcacataaacatgtacatgtgggtataccatgtatatatgagtaacatacacacaaacacacatacacataaatatttcacacacatgaaaacccaacatgcataaatacatacatacacacgaacaaacatacatgaacgcataccacacaaatatacacacacatatgtgtttcacttacatcacccaggaaacatgctttatcgtacttacctggagtcactcctggatataacagtttgtaagagtcagttcacgtatgcccttcattcattgcaacatccaaaagccatgtccagtccactgtgtctgcagctttgtggcaggtggcaggtacagttacatgtgaccccccatcctgtaagcttctgtcttatcagatacatgacaagatccatttcaaatgtgtgtggcagacattaggtataacttgggataccatgggatccccaggccaggctggagactgaaggcgagggtttgtcagaccaggggaggcctgcccgctttggacagtgatcagagcctgggtcgttattccaagtagaaggaacaacagatgtaaggacacagagctgatatcagggggcgaagctagagctggtaaagtttcattatttctgggcctcagttttcccctcttcataatggaagtagcagtgtctgcctgtttatggagctaagataaggtaagaactcatggttggttatgcacctggcagagttgacccgagttcccttttcaaatctagctgcaggggcccacgtgccagacttgattttaaacaagataaaaactagatactaggaagagcctcggcgttgttgttgttgttgttgttgttgttgttgttgttgttacacttctgggaagcactttctgccttgcagatggagccctgaacagtggcagagggccctgggtcgtttctcccaggactaggaaaacgcatagctgtgctttcttaatgccttgatgtttggtttttgttgttttatttttgtttgcttgttttgttctgtttgcaacagagtttctctatgtagtcctggctatcctggaactcactgtgtagaccaagctggcatcaaactcacagagatccactgcctgccttgttgttagcaatatgccaccaccctactggtccaggtgtccccagtacggttgtctctctagtgacaggcctgccctgcctggtgttctgcccactcacgaagttgctgctccctctcctgtctttctgaaaggtggctgcaccatgcattccagacagggaacttcagctctcaatgcagtgtagacatattttctgtccagtgactaaatgctgcatcctaggagggcgatggaatctttccactgtagaatcagctctgactcttctgtgtggagaaatgagttatggtcttctcagagcttctgtttaaaacctctccatgcaactcaccttttgtctgccagttcccatgcggtctagccactgcttgcttctcagacctcactctcaaccactttacattaagccccaggctctaggctctgttctggggacgtggtgagcagtcagccttgctattgcctccgttctggcctgctgaccttgtctggaatgttccaacctgcatccttatgtggagacttgtgctgtccactccctctgatctaagctctagcttcttatcatgctctagttcctgacatggtcaccctcttccctatcctagcctctagtatattcctttgggggtataatgtatctggggaattatttgatcgtttctaccctggagagtaaactatgaaaatcagtgagattgagtttatttggctaacgtgcagagcaacacctagcacctgccatgaggcctgctatggaaaggaggagggaaggaagaaaggaaggaaggaagggacaggagaaagaggcagttgttttccagaaatgacccccataacacatacatctccagctgagatgtgtcccaaggaggaaagtaggaatgccagtgaggtgggctgaaggtggaaattcataacttctgttctgaattcatgcttgatctccaaggcaagggccaacagacccagccccatcttccagccaaggtaaccttggctttgcccaaagggacacgtcagcccccgttgcttggactggaggatctgggggcactgtcagcctgaccttcagagataagggagtttgtctctggcatggggacatttttgttgagcaagcaagacttgtgggtggtctcagtcctgaaaagacggttccccctctctttattaaaccataaaccatgaacatgatattttctaccccaaatcacggtgtgtgggggggaaaccatccgtccctagcccacttaagattccagaacaccgctcatgttggccctttgtcgttttagtattcaatgcagtcaatgaggctacctcatcctggtctatcagaaataccccactcctgttttttttttttttctttctgggagcagcatgtcatttaccctgtcatgtgttagcggatccggtcctgccctctcatccccctcccccacccgcccaggattacagcttcatgaaggattccagaggcgctgtgtcagttggtagagtgcctggcatgcacaaagcctgtggctctgtccctaacaccgtctataccacggagcgtgtgtatacttgtagtctcagcacttgggatgtgaagtagggggatcagaagttcatggtcatccttggctaaacagtgagtttgttgccagactgagctacacaaacccatgttttaacaaaataaaataaaataaaataaaataagagcacacagaatatttatagtttctgattttgttggtatgttatttctctgtatgatggtgtaatgtgcatatatgtgggcatgcagactgtcagtccccaccttccatgctgcgtgactcagggtctctttgttgtttattgacgctggcccacaagtttcctgagatgctcctatctgtctcccatctcacaccttcggagcacggggattgcggacacacactcttatgcccagcttctacatgggttctgagggttcaaactcaggtctactagctcgctccgcaagcatttataccctctggccatcttgccagcctctggcatgctatttccaaaagggtagtctatctttgccagcagcaggaagaggtgcccattttatcctgcccgtaccacacagctcattatcttccgtcaaaccttcaattgtgcagatacctcctgcccagtctgcctaacatgcagactctggggtctttgtgatgtggaattatccgcccatcaatgcagatttcagcgaagagctatgtttgccattgtggtctgatctgttgttttttaaatgcctggggtaatatcctcaatcagagggcaaacagaagaagggaaaagtggtaataaaaaatgaattagggtgattagcaagggtgagtgcttccctcctcaggcgacaggctgagttgacggagctttgcagggtggctcctgtccaaacatgcagctggattatggcaacctccaggctggccctggggtctgctctgcatataggattctggtattgcgtttagttctgcaaaggtcattgatacctcttggaggaggatcaacccctggtgggttggagcagggtctccaaagaggggttactttcccctcccccctccccgtttccatctctggcccagctgaggacctaccccttcctttggagcagagacttggtggacttggtctctgcgagaaggaagcaaaggttttaattgactaatgcgagcatagtgggggttctgagaaccagggtgctcagtgaccctgagtggggctttggtgagccggtgcagaaggttgggctatgcctcaaggggagagggagaggatgatacattgcattttagaggacaccagaactagctgggctgggtcctctatggttgagaagaagcagaattctggggagtgaggaaggtgtagtgttgggagttgcagccacacagggtaaaaggagccatgcacaccccgtagcagggttggctaatattcgtgtcagttcatggggtgatgacagtgagtctccaaagattctgcatcgcagaggtccagaccagtggtccctaaccttcctaatgctgtgactctttaataaagtttctcatactgtggagatgccccccagtcataaacttattttgttgctacttcataactataatcttggcactgctatgaatcataaatatctgatatttgaccccacagggattgcaacccacaggttgagaaccactgacctaggagttgctggagggctgaccagagcatgcgcatatacatgttgaaatgcctagagtcagctcaacccaaggattctgggagagggcatggatgaggagaactctcagtagaagggctgtggcctcagcttgagccacgtcctccagtgatccgacagtgcccgcatcaatagggtggaggttacaggtgcgcaccaacgcataccgagcttctcacgtgagtgcttaggtttgaagttgggtgttgatgcctgagcatccttaacaacttatccccacgcccctctactcacaggtttggctcactcatggagagcttttcatccttccaaaggacgaggggaactaatgggaaatgaaactggtgaaccacagtacaagccagagttgcagagtcgcaaggcagtgggactgcgtgtggttagggctccatcttgagatgcgtccagctctggccttaaggacagtgggactcatgaatgcttttaaatgggaacagtgggtgctgaatccccctttctatatgtcccctgcaagagaactgactggcactgcaaacagagaggatcgtttgaggacacacgacagcatgatcggtgtccctgtagggtgtggtgcacctgcggcatagacattgtgggtagacgcatccaagactcatccagacccagtgagcttgggcttgagaaagagccccaagatgcacaaagcggcttcagtcacttctccacatgcaatccattcaatggaagctcacagcttctcggctcttacaggtgccgacagagacatcacaatattgtgaaattagacgcccgaagctgacttcattaccagcttacctggcgtcggagcagcagccgccttagcaccgacagttgggtgtgacggagctaaaattgaacttggcaattaccgctcctgagaggttctcgagactgtgaaaggaaggttccatggaaatcaaccctgataatcatggggtttaaaattaggccgttactattaaggctgcgccatgcgcagaggcttcatgagtcaagggacgggtgggacaggacggggcggggcggggcgggtttgggcagcctgaggtaccttgggctagtgcttgcttttccagttagttccagtgtggaagctcaaggccactattgtttcctgcatgggttgcctgtcccctctcccgcctcggcttcctcagtcttcatgttttctttagacctgcaaggggctttcctgagtctcttggtgggacgtgatccagggagggctccactctggattccagctcagagaaaagagccctgtgacatagctgaaggctccttagccctgtatgggattgtcttcctgaagcactgtctccctctccttttccctctccccctgtctgtctgtcatcagtcagtcagtctgtctgtctctacgtgttctggggaatctggtctaactcaggtcttcatgtttgcaaagcaaacactttactgactgagccatctccccagtgcctttcctggagcttctgtggactgtcgttcattatgtccctatttagtagatgaagacagctcagggcccatgtgtgctcatgagtggtttctagtggattgtgggaaatcactgtagagtggcctggctgcacgctggagccttgtgaaaggagagacagaagttcaagcctgctttgagcctaagctttctcccctgtctggcagacttgtgctgtgcagatgtcagggagtgcctcctatgggggggggctatcattcttaatggtgatgtttatgagccacctagtttgtgccaggcaccagaccagactcttcccatagttaacacctgctttgcatgctaaaaccaggggaaagctgttactcctgtctccacattagtgaatgaaggctcagagaggtatctgaacaaggaaaggtagggccagacttccaaccccggtgaactggcccaggaacctggtcgtagtcccttcaccctggaaatgaacccccaccaaagtcccacaagaggttttatttcaacacacatacacatacacacacattgcgtgagctgtctctagggctctagagaggaaggcagaaatggaaatgtcttcccagcccctccacaggaagctgcctcatctctttgtgtctctgttttgaaccataaccatccaacagccgagtaatctgaaaactaagtataccaaacaaaaactaataatctaaaacaaaagttctgggggcctccaggtgcagggcacctccccagttccatgccagctgtagctcctctaggctgccctgggtaccttggccacatgttaatgctatgaaaagaacagtgggtcctggaatggagctgcccaccccccattctgaggctcacctcgtcaagaaagcctcatggttcagcccactgtgatagggggttacccaccctggccctgcccagccctgttgctgtcacactcaaagtgtgtaaatcatgactgggacactcaccatcccctttgttccggtgtgggaccacactctgagccttgcctcccagcccaggtgggagaactcggtccagagaccccatcctggcctccgccctgcagagtgatgcttcccccctccaacacgcattggcaggagtggggttcaagattgggagaagaatatagagacttcaaagacttgtcccagatcaacctacttcagtctcttcaaatgcacccactttctttaaccagattgtccctgacttagaatagttaaaccgaagatttgttttctgtttgcttttttataataatgcaaaagcagccaggattggtggctcatatctataataccagcacctgaaaagtgaatgcagaattgtgagttcaaggccagcctgggctgcagagcaagaccctgtctcaaagccaagaaagagtgtgtcacagcagtgtgcaccaggaggctggggacaatgccaatgacatgcaagtacagcagtcagtcacccaagccactctgctgtggtgtaagtgtcctgcacctgtgtgaggtgggctgggctaagccgtggtatctggagtagggttttgagacaggatagcttcagcttgccgtggacttaccaagatgtaattctgtaagtcagggagtccctgtattcccagactctgctccttgttcaaatcctgctgagtgtgcatgcagctatgtgcattgtgtgcacagaggaccatttgaggtgttgtttcccaggtctgtctggctccgtggttgtgtgtgttctctgttttgagtgcctatcaggtatggggccttgtctaggagctggacttaacttagagataaccaggatggataaactcaagcatctcagtgatcagagtctctcaggggaagtcacttagtacatacagggacacacctggcacaagccttcacttgttctgcagggaggatgacctcctcatgaggggggcgtgacccatgccagagagcagtggggctcctcagggaggaagagcttggcaggtttggaagggtgggacaggctggcaagagcattgcaggaagtggaaacagcgggagaaagatgcagacataggagctacagttgtccacctccaccacagctccctcctgctctgggcccctttatcaccgggctttgctgtgccctggtccttgtctgccacttggctgacctttgctgtgtgtgttgactagcaggattctccagtgttcttctttctcaggcctgagatcttttgcagcttcgatagcgtctcagcttctgctgcactggcaatgtctccccaaacatcccatcaatgtgatagcaccaagctcatggaacctagtaaatactactcccccattctatagacagaggagtcgaggccctaggaagtcagtgatctcagccagcagagctagaattcggctctgatttagctgtgttcatatgaaagctgatgagattagtaggtcctggggctacacagttccaaggctcattgtcccttaaagggtgacattggcctcttggcctaacttcagcagggatgattaacagagggagacttctatgtttgtttttttagtcatatatgcaacatttgctcgtgcaaaagaaaaacaaaaagacagacgtggcagctgagtcccctcctcctgctcattgggtgactacagcctggtgcccttgacaatgtaaatccaaggcatgtgcctctattccaattcatgcacgcacacacacacacacacacacacacacacacacgtacacatgacaaaaacatgaacatgtgtgggcatgcacacacatgctcaagagcatccctcccccacacacatacacacaccagttcatatttttatacaaacagaaccatggccttgactttctctctcccaaccagttccaaattgtccccacagacaagctcattccactctgtgtctagtgtcttcagtcagttccggcttcagatgttcatcctgcttcaggtctgtgtagtgagcagcatacgctggtgtgcctgtgtgcgggatgcaggtatttccgcagcatcgatgctcaggagtctaattgctgaatgaaaggcttgcagcttttacaccttggcaggtgctgacaatttgccttctgaagggccttccggtgcaggggcttctcccaggcagcatgcctctgaagccaggggtgatggagctgtgtatgggggggctgcctccttgtctgttccccaagacctggtacggtgctccaaacatgtgggcccaaattgggataggagatggatttggatcaaagaggttaaataacaggttttcctgtttcaccttgtaggaatgggatggggggcgggggtgccgggcctccagccaatagaggaccaagagtcgtcggcaggcttataaagctgctatttctggcatttttttctctttctgtgctgattatgcagcagcatctcacagaggctgtcgcaggcgcgttctctcgctgcctgggcttccgtggaatgaggctcaggctcctcacgagacactggtgcattgcaggtgcgtctctgcagaaggtaagcagcggtgcctgctgcttcaaggggtgaaggtgttcaagctggccccggagggcgagatgggtgatgctggatcctgggcggggtcaggccatgttctgcagtgagggtgctgtgcagggtccaagggcctggatatggttcttcctctctgataagaaattctgtgtgtggctggccttgtctctgctaagtaggattagccaccagtctggatgcccagggcactcaggaagcattcattcattcattcattcattcatctattcttgtattcatacttatattcatatttatatattcattcagtttgcattcagctcacatatagcagacctagccaggtgtaggtgtttatgtgagtagattgggaagagggctaatggatttagacaagaaacagtgagaacagtgatggcgacagcccatgacgtgtaaggatccagatgacactggactgggcatgggaaaggtcgtctgagcaagtgacaggaatgaggtgcagctagggacggcactagggaaaaaagtgggggaagcaatgaaaattctcccctccttttgtaaaggccacctttcttctcattaaatgagggatgggaaatggaaacgaccagctgggatctccacggccaccctgttggaggagatgtgcagtgacaaaggaaggaggagcaaaaagcgtagcaggtgaaagaggctcctgttagtggcatttcccactgcccctgggagctggccggggggtggctggcagagaggacagtgatccttctggccctcccattctccatcgtcattgaaggggatctggcttcgtgcacgtgcatcccagaaatggaagctgacagctcttgcccgtgttcctttatgtggaacattaagggaacagagagaaagaccaggaaccagaatccttcatgcctcctgagagcttccttcctaatccccgtacagacacaaagaatggtccaagacatggggcccagcacggcccaagggaggtcacacagccagctggccggggggtgggagggaaacagctatgggtgactgccaagaactagggtcactggtgggtaatgactgctttcaatcccagtttcaccctgagtagtcagtgacataatacaggcacctcagactgtctgagtctcggtgtctacacctgcaaaatgggcactggcaccttctctgggatggcatgtacatgtgcatgttcaagcacacagccacgttgttcatgttgcccacactttgcctagtagctagaagggctgtcatccatgttgaatgggtagatggataacccagagcagctcagctggggaggaagccaggatgcccggaggtgggggggaacacacctgtgctctggtgcaagcacatggggcttccaagcttccattgcatctagagtgggaggtgctgtgttctgtgtggggctgtctgagaaaaattgctctggatacccccatggcttccttgaaggctgctaggcaacctggccttcccgtcttacagggacaggggctgtctgagaaaaattgctctggatacccccatggcttccttgaaggctgctaggcaacctggccttcccgtcttacagggacaggcagccaaattaccagctgctgagtgtcacctgttgtgtggggagtctgggcaagatgcaaggggatgacctaggaagggcgggtgtggctggagaattgttagtccgtgaagacctcttgtcaggaacagggactgaatatagatctagggctcggcttggagcaggtctctgctccacaggatcaccgtgtgaccccaggcaggtcacttttacctctctaaccctacggaatggcaggttaaaggatgacaaggatgagctatgcctggcatggtgttgtgctttgtgaatagaatgtcccccccttcctagggaagggatccagggagctttggatgggggctcaatgtctgctgcagactggcattaggtaggctcccgctgaaggcttacgtgactaaggaaggtggccagagtgtagactccagtcatggtgtcaatcctggcgctcttctcagaaataattccagctggtcccaccaactgctcctgttctgctatgctggcagtcacaggtgggagggggactgctgaggggggggggcttctgctggagattagctttctgtctgagactcactgggtccccgatgcctctcccagctgccttcttcaggaaccaacctatggttactgagatcaggtactgaagtggggtaccactggaggaggcagctcaggctcagctgtgaccccggaggggcctgggaaaacaatcaccccctgtctctcatggggtctgggagccattttccaaggaggtcatccctcacatccacccatggttgagttgatcattggagcagctatgggggacgaaggcttccatttttctcgctaggagacccatgccactctcttacctctgaggagctcataaaggccgtgagcacagactgaaacacccacaccctggaggggctcatcctggaggaggcgaggctggaggtagccttgatttacccctaccacgctcacccatcttagtgactgttactgcccactggaaactgagacacagacctggtcgcagcatggcccccttcccaccctgctctaacccacttcttcacgctgctggctttcccttcaaagcttggccttctgccactggggtgacttcatgaacctcttgtctttaactttcccgttagaatctgcagccagctcagcggactgcttgatagtttgccccttccatggaccccaggcagctggcagctccccctcaccctcacccgtttccatcgcaaagcctctcccgccagcccagagctcacccacctccaagctcctgagtttctgcttcccctgggatcctgtctgacacgctctaaagctccttccccagccagaccatcctgcctcctacttcctaatcttcaggccccggagtccacagtgggtttctcttatacctccaactccttctaatctgccagggacattgcctggacaccaaggctttgttgaagtcccctctgattgtcttgaagtgtatgtcatggtcccttgaggatcaatgtggggctctggagggccttacctatgaatgatacatattcatgtatttatgtatatttattcaaatctcctggaagtatctgcttgggatatactcacctagacagaagtaaaaagaatacactataaaagtaagtcaggccctatagacaaacgccttcagagtcttcagtctgtaatttcatgcggctgtgtgtccttggacaagccacctaacctctctgagcttgtagtgttatggggattaacaagacaccatgtatcacatgtctcttcgccttgctaggcttaattatccctctaggacacttggaacatttaaatgaccccttccgtttgctccaggcagagaaaacccgaagaggggccaggcacattggccctgggtgccccacacggccataggtccctaaacaggggcaaaaatagcagccaccagggcaccctgtgatacggaagccacagaaaaagccgcaggccaagcggatgtcagctgcctggaggctgatgtgctagcgaagcaaccctcaggcctgccctggcctgtctctccaaccacagcatcagataagcatggggaaagagtgctggcttcctttctggggagggtaatcgcagtgccatctgtgggagggctttgccctatcatccctctggcctctgctcccttcccctgcctgctctgcccacagtgatgtcccctcgctgaccaaggtgacacctgtgcactcccccgtgaagatggtcggactggccactgggcagcatggatgtcctaagccagtacaggcttggctgcctccctcccctcctaccaatgtctatcttcctgcaatttcctcctaaaagtccagtttgactagctaaaagagaattcctcctgataccgtcacctgctcaccacctccttccaggtgtgtacagcctgtgcgagccacttgtctctgatggtttctctggcacaggacagtaagctcagacactaatccttagcagccccgaacaggcctggcacaaagtagatatagatactcagtagcctttcagttcatagacacacacgagcatgaggaaccatcaagtctatcaggagagtctgcagctggggttggcagtgtttttaggggctttgggactgagagataggctcattgtctttggagactccggcatcacgattttattaacctcgagcagaagtccctgctgaccctgaggtggcagatgtctgcattcagagagggttctggaaatccatgtggcaccttgcaaagggtcagtctttgaagttgttgtgagtttgactttgtccatttgcttttgggtgagggtcttgctgtgtagcccaggttaacttcagactctcccttctcctgccccagccctccatgtgctgggatcacaggcttgacccccgtgcctggctcatgagttcgtccctgggcccactattccaggtcaaatcccagccctcccacgtctcagctgtgtggccaccacctctgcatctggtattttagtctccttgtctgttcagtgagtgatgattctgaccttgactgcatcatctgcaggattgcgtatcagctctgtgaagtccttgtcttgtagcagatggtcagtaagtgactgcttgttaaaaccactcactgaatgtattagtcagctgaggctccgttatgcctcagtaacaagtcgacccaatcctcagtcatttatcacaagcataagttatttatctttttagtattatattagttcccttgccctttctcaaccctcccagcccttcaccatctcagcaagtaggaaggtatatttttgtgcctcccaaatgttccatggcaattagcagataattaggtcttggattcagcttcacccgggactaaggttagtctcatctccctctagagacctgctgctccttcagagccagcctggagttttcatatttgccgttctgtacttccacaagaaaagaccattcgtttctgctcctagaccattggcctaaaccagcaccatcatatggcgagtgcatccagggtccccgtgctgagagaagaggagaggaagtctatcacggtgggcacatcccgcctggcggtctccaggcagagttcaccttcagcccgagggaacttacctggtgttggctgaaagatagccttaatacatctctgtcctaattcctgagacctgactgtcatctcatgtggcaaagaaagataaagatgtcaagttgagggacttgtcctggcttccctggtggcctagagtcattcgaggtcactgttacaagggatgtagcaggggatctgagattgtacatgacgccagaagagaaggggttaagctgataggcgttgaaggtgatgaaaggggtcacaggtcaagggtcataggtggccactggaggctggggatgcaagaaatgcattttcccttggagtctttgaagctcttgccctgacatggtctggagctccgagggacgaacttgggacttctggcttccagaactgtgagagaatgaattgtgtgggttttgtcattgctactaattttgttttgcttcagtcggtttgtgggtttggcggtgcctgggacagaacccagggccttgtatactaagcaagcatttcacctctaaggcccagccagtctgtgtagttttacatgtacctgtttccagtgatttgtttgggcagccacgaggagctaacgtatcacttcaaatcagaaagtactagcaaaacccaatgcctagaagcctcctccactctgacagatctgctcctttgccctcacactggtctatgtcccctgttctgcctggcatttcagcctcttggggggaatacatagttatggtgaaagatgacagtcagaacatgttcagagcccaggtcagctacttagcgactgtgagcttgctcctttatctttccggctcagtccccacctgcacagtgagcacttgggcgaatggtcccctagcaagggactgtctctcagcaagggactcacacaactataatggtacttgattcagcgcaaacctcctttctcagaaacttctgatgagcagagggagcaacgggcctccgtgagcaaaccttattttgtaaatatactgccggcttgtttggccctcaaacccggcctgattggctcaaggctcaactctgcgtaataccaacccacttgtgtaaatattcccctcccagcttgacagcacagatgcatttggcagcttgtgtcacccctcgctgttgcttttctggaagccgaccaagcaaaatcagaattctggatggcatgggttctggctgtgccttgctccctccagccctgcagtgcccaggacttcatttgcccccattttcccagtagcctacatcctctctgccagctggggctaatatgttctgctactttagggcagaggttaagatttggggcaggaagagcccacacatgcaaaggtttctgctatgaattgaaaagggaaatatccttttcttttgcattgtcagaaaaagaaatcaaaaggaagtgtgtgaccaaggaaaggaaattagggtttgccaccagcatgagtcaccccttttctgacttctgagtagacctgagccttgctcattcactccccgagctcctcggtaccagattctgtggaacgctgggcccgcagtgatttttaagctggctatagacttcccattctggccatcagtgtacacttctcctggggagtcatggccgaactcttccatttaatgctgctgcttcttctactgctgttgacgctctcacggaactggtgctcaccatttggcaaggctggccgggttagctgcagagatctgcctgaagccatctccccagacctgggattacaggcacgcactgccacagccagtgttttatgtgacttctagggatcaaacttaggtcctcatgcacttagccaagcatcggagccatcctccagcctctgcttactggtgctttatccagggcttcctcggtatgcactggtgcctcggactcttctcctggccccacttaggaccgcagccacttctgcttggtcatgggcaggttcctctctcctccagaccatttacagcttctatctgaaacacagctcaaatgctggccctctctgtccattctcccattacagccctgttgcccctttctctcggcttttctgtctctgtgcacttctgccttctctacccatctcccccaaccctgaatgggcccttctttctcttttaggtctcaggcctggggatggctcatccccaaccctccctcttgcctcaaacctttccccacctcacctgtctcctcatgcttgcagctacctccttcgtgcctagctcctatcaagtctccggcaagcctgtcactcaccctgatttgaactcctgctccagtccccatcatcgaacaaaggctgcctgtgcctcatggataccagcgtgtccttgaggcagttgggcaccaggaggagggaatggcttcagacacagattggggtcttgggtactcttccctgctgtcttaccatttggcggtcaccatatttctttcccgtcagctaaagctattttctgtgtgatataaaataggctagttccacacttgcgggtttgggtcacgtgtgcttcttcattgccattgaatgaagcgtacgttttcaccagcatctatttcttggaatgttgcctgtcaggtgactttcctgtttgaatctcacatctttttgtctctcagcatcttgcattccgttgaaggtgacgagccatttctacctcgtatatattaacagtctcgtcgttggtgctgatattttcctagtctgatgtccttttcatttcagttttattatgcttccatccacagaagatattaatgtgtgtatatttgagcctgtcaatctcttcctctgtgattgcctcaagggctgaggaagtcaccccgcccctgtagatctgataaacattgtgttctctcccctgattgtttccctccagtagctttgtgtacttaactcttagcccgtctgcagtgcttggggttggtggcttgctgtggttatctgcttcagtgtacccataacaggacgagccctgatgtcttgcgtttattaaataattgctctttatctctttgtttccaaaaggaaagacaaaataaagtagccgtccccagcgagcgtgactttttggcagccatgggttggctttgccaccgtccagttgtgtgaccccacagcttgccgatgagagtctgcttgttttctcctctgaggaatgtgatgttgccatcttgctcccagagctgttgcaaaggccatcccatgactccaggcgcagagggaatgaatgccccctatggcctggtgtttcctcatctcactggggctaacattacaaaatttgttcctttgtttttaaaaccatcatttggggactgggaagatgctttctggttcagttgacaaagtgcttgccatgcaaccctgaggtcctgagttcagatcctcagcatccatttaaaaaaataggtgagtaggtcttcacctgtacctctagcactgaagaggcagagatggggccagcgtgggggcggggggcaacccagccaagccatggtgtcagtgagagtctctgtctcaaacactaaggtcgaaagcagttaaggaagacacccacccccaccatgcacacacaaacatgagtacatgcatgtgtgcatgcatgtacatacacatacacacaatttgttctttttaaaaatttttaaagattattttattttacatgtatgactgtcttgcctgtatgaacatatgtgcatcacgcgtgtgctggtccctccagaggtcctggcattggtttcacacacatgtgtcactacctccttggctttgtaagctgctctgcaaagtctcactgtctctccagagtaggctcctgtggctgttctgtaaagatcgtggaaggtctccttaaggttctcctcggtaattgttggtcccgtctctcccatttcacactggaaaccagctcacttggaactaatcctctttcctaactcacacaagcacaccaagtgtctcgccctctacctttgtctcactctgcctctctacccgacaggtgtacatcgcttgcatttctgtggctggtcctcagcatggtgcctctttctttctgagggtcagcatgtcctgagagccctgtgtgcccctggaggtcattctatatttaaggtgccccttagagtttcacctggctcataatgtcaaagatgctcaagtcgaggcttgggaaaagctttgagctctgacagtaattggatcgtatctggattgttctggaggcacacacagacttggggacccactagggtggtggcagtagctcttcatatgatattgccagtagccgagggacatctcccagtcttatctttggtttacctaatagaatgcagagaattttgaagtatgaccagcctccacagtttgtgatttcccctaagccaagtggtgtagttgtgaagagagattagagtaattcctaggtatagcctgtgctatagagggcagtttacagctctgttttctgagggagaaaaggcctgttaagacagtctccaaccccatggcttccttgaggctccaggagagagctgagctctggggcataaggtttcagtggtgaagaacagaagggtagccccctagcctagaaaattgcctgcatgaatggatagtttgtttatgacagggtcttactatgtagcctcagctgcccttgaactcagatcctcctgcctcacccttcctaatggtaggattgctgctatatgctaccatgtctgcttccacccccattttacaggggaggagtctgaggttcagagagccaagatctttgctcatagccacacagcagccaagtgaagaactgggacttgaacccaggtctgcaggctttcagagatgcagctgatatcctctctagctggtggcagtccaaaggcaggtagcaacaccgtgcttaaatatctatgagccgagcttacaaacatgctgtcctctgtggatgctggagagagggaagtgaacctggaactttgtatttgttgcctttggggttagatgcacaagtggcaggttcaggtgacccagaaaagcctttctaggtcaaattacaatttcaaaggactttctccccctctccctttaaaaccaccctgcgatccaacactcagcactaccgttgacatctttccctcccaacaacaccagccctttgtggcatgattgaggggcttgttttgcagccctgggcagaaaatatcttccggatcatctgccactcattgtcccggctcccctcccccacctgcacagtgtcccacccgatacagggctcttgtggcttttagttaattgtctctggcaaggatctgttctgggacttgttcccaaccacacagaagatagatcattgtcaagcacaaatattggcagttctgggcagctcagggctctaggctgctaaccacagccggcctccagggaacgacggggtaagagcgcagaataggcttagcctggtcactggagcacaggctctgagttcaaaccctacaggggttctcccattgcttagctgtacagtcttggacaagcatgctcacctccttagactgtagttccttcgctgtggaatagcagcctggatcctagttactttccttatgggtttcagaagatcaaatgagttactgtgggcatatctatgcagcaagttctatgtcatttttgtgcaagttacttaatgtgagcacgtgagccgcccagttcttctccaagactgagacattcatcctgcatgctcctgcctcatagtccggtcctcaccctggtgatggctttgggtgaaggaggaactctggatctgatggctggcccacttctaaacacaacatttggctccctgctctgatttgggacatctcctcaaggccatcttggctccagagtctccttgggacaggctgtgcatgccccactacacagtcctccttcctggcttccctgaagcagttcacagtgaacatccacctgtagctgggccctagatgttgagcaaactctggcttttagtataagatctatgcgcctgtgtgtgtgtgtgtttgagagagagagagagagagagagagagagagagagagagagagagagagagagagagagatgaaataaaacctcttgtgggactttggtgggggggggtgtcttgtcaccctgacctccagtgtctgaatgtgtgccacttaggcacctctgcacctctacctacctggtgatccctggtgatccctgcaaggatgggtcctcattcttcagccctcttcagaggggaaggaggagggaccttaagggactaccaaagggcccagagagtttgtttagtctgtccagacacagataaagacactgaaaaagcagaagaccttatctgttgccacctagtgagctggtgtctcccttttttcattggaggaagtcacctgcaataggagtttggtcctaggtacttgtgacactctggtccaataaatatcatactttataaatgtccccagtctggcttaagtgtggctcctggagggacagtgtagaggttgtctaggtaccagctgtgtagaaaaagataagaaaggagctgctgtggtgatacagtcccagtatgcagagagctgggtgcatgctggagcctgagccaccttagggcagaagagggcggtgggcatatttgtttgtagcatgagcccaggctggatggctgggctggccggcagattgtcaagtgctttgagttctacttcgaggcttttgactcttagtagacatggtggggtggtgcatgtctgtaatcccagcacatgggatatcgaggtagaaggattgttgtgagttcaaggcccgcatgggctacatcacgagaccctgtctagaaactaagaaacaacaaaaaattggagtcttcctcagggcttgacagaaaaggatttggccagtgtcgcatgggggtcttgagtgaaggggcaggactagtgctgaggggcctgggtaccagcggcactgtgggggatgggtgagacagggttagggggtccctcttttccccctctccccatccccagcaaggctcattggcattagcctaagctggaccagggggatgctagggacacagctgaggccagctgagcacacatatgttaggattctcatggaggatcccgggcagaaggccacaaagtcctgagcccaatctgatgggttcccagccctgccccttggccagcctcatctggccacaccctgacctacttcccaaccccggccccctgcagccgaagccaggcctgcagcccccctcccctggcaccgttccccctcacagcggccaaatgaaaatgtttgttgaaaacaacatgtgcataattaaagcttaatgagcgcttgtctgtttggaatgtgcaattagatttataatcggggatgggagcgggctccaaatggctttaaatggagctgagagagaggataatttttgccataaatctgcagtaatgtactcgatgtgcgagttaccagaggcagcaccaggccaccatgctgtacccgttgggcagctgcagatgactgtagtgctacagtagggcctgccagtgactttggaggaggcttttcttcgttagatctggaacagccacctgcatgccgacagatctgtaattgagtccactgtgggagatgggaccttctgctgagtctactgctctggccccaggatgacctggccaggcaagactcctccgtcctgaaaatgtcagcaaggagagctctggggtgcagcatgatcctcaatgtttcctgctgtgtgccccagaacctcagagcacgtcacaaggcttcagtaagcatttggtaaatgaatggatagttctatgtcgggttcttgcctcttgcaggtctttctgtgtgagcctcagtttccccatattgacacagagaaatggatttggccattgctgatgctgagtttgccctgtccagagccctgggtctggggcagatggtggctgggccagaatctagatcagccaggtcaagcagaaaaggatcgcaggtggggctgggtctcaattctgtggcagagagtctggggcagtacgtaggaggccttgggttccatctcccagtgcaagggaagcagaaataaatagattgtaaaacaagccacatgatgtgcttttgagtatctttgtagccacatactaaggaagtacaaggagaggggcgggatgaactttaatggtatcttctggtgacctaggtcagctaaagggttgttcctatgtgtacttaatataacatttttgatgaagtactggacattcttgctgtttttatgtctttgagatctggtgtatatcaaatactcaaacacctcagtgtgaacaaaccacatttctaggagtctggtggagagggctggggtccccatctgtgaggtagagatgggatccaccttccagaggagcctggctccggtagcactcatctgtgactactgtggtgactgtagccaccacaatacttcttgatgatttctattgactagaacaatgttactaacttctgtgggcagtggaaacaagggtcttcccagggcccagagctgaaggggtttgcaaccccataggaggaacaacagtatgaaccaaccagaacccccagagctcccagggactaaaccaccaatcagatagctccagcctcatatgtagcagaggatggacttgtgggacatcaatgagaggagaggcccttggtcctgtgaaggcttgatgccccagtataggggaatgtcaggacagagaagtgggagtgggtaggttagtgagcagggggaggaggggatgggatagggggtttttggaggggaaaccaggaaaggcgataacatttgaaatgtaaataaagaaaatatctaataaaaaatgcaaatatctcaggagagtggagaattcagtctgcccagcatttgaaccctggcagcctggcatctgtgtctggataaactataattgcacttctccatgtggtcgtgggcctggatttgctcaagcctgagggttcccttagttaggccaattctgatcctctctcatctgcaaacgtctctttcccctcgcctgtctgctgaatcttccatgtgatacccggctctctgcagagcccagatcacagctgacacactcttgctgctgtcgacagacctcaactctgtccgtgcagactgagagttgtcaccggctgcagcaggcctggcaggagcagagagctgctttgagcctttctcttcagatcgctgcaggcacatcacatggtgccttgcaactggctgggctgagagctgtgcagcctccacttttgacctgtgtctctgtgcagagctgagaatcagcggctttttcacagttgcagctttggtacccaggcttaagaacagggttaaaagcactggctggctctgggcaagcttccaagtaccccgcatctcactttggtcatctccatagtggggctgctggtggcggccttgctatttctagggggttctaatgagatgcccaggcatcgctctgggtctggaaagctggtcactggcgcatgctcacaacgatcggatgtcatgttcctgctttttgccttgtctgttcctatgtctgagccctgcctaagtgcctctgttgagaagccatcctccctgcttctcctcccctgctaaccctgtcctggtccctgtcacggctgtcataggaaacatcactgcttgagggtgagatgagagctatgttcactgctttactttagtgttacaagtcaggctgaggctggtattgatgctcagggaagcatggcggagtggactaagatacttagaaagagaacctgtgtgggctggcaaatgacccagctgtggccacaaggctgttgaagtaggccgttattggtcacttggctttcagaggctggccaatgcaaagctgaccgtggcggtcaggatgggctatgaactggtctgtggtcctctattgtggcttagagctggggctagggagtggccatttgtcatctgaaaggctggaaaaaagaccagaccacttgactggtggcttctggaaggcagggccgtgtctgatcactacaccccgcctgatatctagtgcactgtttgcacatggtaggcaagcaaccacccctcagcatcctctgaacacctgcgcttcccacgatttctaatttctctttcccaggaggatcggcagcgcctggcatgtgggggctgctctgaagcacataggggtttaggaactcgttgttagttcttgatacaacagtggccctggctggcctcacttggcacttaaaccaggaccaagactaggggaagggcaatttggacctggggctcaaagagaaggatctgaccatgaactggagggaagcactgagcctgtccagctaaaggaaagggaaccagaatgggtgagacataaataactagggaagattgggagcgtcgggggcaagctggatggcctaggcttttcagtgacataggggacaaggtcatgagtgaactgcggggttgggactgatcaagggatatgagtgagcttgtaattgcaaagttagaaagccactactaagcaactgtcaggaatagttaacattttaaaacactgcgttagagatatcatctgctattggatatctgattacgattggatatctgataacggacaccagaattgtcatgaggtaggaagagcaactcttttttgaaatctgtgcatgtgtgtatgtaccttcaaacacacaaggggacgtgtttgcatgggtgcatagacacatatgcatgtgtgcgcgtatggagtcttcctccatttgctctttatcctttgaggcagggtctttgaacccagagcccactgctttggctagtctcactagccagctttctctgaaaatcccctgcctccatcttccaaacactggggttacaggtggacttcctcactagttcagaatctgccgaatttgcattggtcctgaggctctgacctctgaaccttactcacttgcagggcgagtgctttatctgctgagacatttccccagccctagctgctgttttataagtaagggaaccgagagcatgagaagtgaggtcaaaggtcacccagctggtacacaggggaagcggtgctcagattccgaaatccatactgccaccaaagctttcacagctgagaagaactaagcccaaagctgattttacctaaatgggggttttctggtgtactcaaaagtgtgaactttttagtgcaagatcattgggtggagcgtgttgccagaatgccttcaaggaaacagaagttagaaaaaaattggaattcatggggcagagaaatgaagaagagagtgttctaggatgatgataaggtaggggcaaggagacagacaccagagcccccccgccccagcatccagggtagtatggtgtatgtatgtatgtgtacatatgttatagaaaccaaacaaggcttgatctggggacaaagggactgcctgacaatgccagatcagtggagaagctgagcggagcacgtttgtgggtgatcagattagtgaagattgtgtcagagtcccccagggatatcgagctggacccgtgtggtggtgatatctggtatggttagagagtgctagagaaagagtcagtccatgcccatgaggtcagtgtggaggtattttatttgaaatgctcatgggccaaatgggaaagtcggggtgacttggctaaagacgagtgcctgagaggtggtgacagacagcaactgtgaggatgtaatcttctttggggaaaggacagagggaggagaaagtaccagacgcacttatcaaccctctactaatccactcatgagctgagcctatttcctcccaggtacccacccacatctcatgcatcctagactcccctcaccgccacatacacattcgtttattttatctgccatcctggtcattttcatctgcctgccttttcatactcagccattttgtcatatccactcgttcatcctctctctcaactcatccgcataccccaaccccatcgacccatctgtccattcatcacacccgcaggtggcgaccttgttatccctttacctcactaaggagccacctcattcgccatgaataggttagtgttgatcgtctgccgagaccatgttataaatatgctgactagctagaatacaccatcaaagtgagtttgaactgttcttaaattacaactactagagaacgtaaattacatgtgtggctcacacttatggatcatgttgttttcactgggcagtgaaatttatgctgtcatccatctatgtatcctcctccatctcgccacccattcatctatccacctatccatccatccatccatccatccatccatccatcatccactcatctagctgcctgtccatcattcattccttactctgtatcaattgatcatcaagtgatctgtctatccatacacctatagatccattcatttgctaatcattctttggtttcttcatctatctatatctatgcatgcacacactatccatacctacatgcatccatttatacatacatacatacatacatacatacatacatacggacatccatacatccatccttccatccatctgtccatacatccatgcatacctacatgtatccatttatacatccatccttccatctatctatccatccatccattcatccatgcatccatttatacatacatacatctatccttccatcaatctgtacatacatattcattcatttgtcactgcatctagccatccacccatccattaatccaccatcttaaatccctgccttaatccatcattcattagctcctatatcagtccgcccattctttatcagccctgcctctgctgatccacctgtctctccatcatccattccccatttgtttgttcctgcatcaatccctccactgttttcctcccttctctcatcggctcacttcccatgtgtctccatctcatagcacatatctgtgaaagatgtatatttttatctatcatgaatcagaggcagtaggttggaagagtggggaagccaaggcttatgtggaaggaacttgcctacggtgggacagatggagctgggctctgtctctatcagatcagggatcctcatttctcactttggctgctttttcgttaggtatcttttaagataaaaacagtccttcggggaaacacaatgtgcttaggtttgggggtgggaggtggctgttgcaatagaggcctaagagctcctatccctgaggcgaccacacagtgtggaacaagtcagcccctttagaagcctctgggaacctatccctggtggctgacatgaaagggttatccctacacattcgatatttgaaaaaaataatgtgggttctttcagattccaaaactcatttccatgacaaaactcttgggaagagaagatgaagggcctggcttttgcagaacaatcttccagctgtaatgagggctgaagatggcagtagagaagggattataattagaatatgaaatggggaaaattaatctattccaggcaacggtaagaggatgttctgacgtctcatagcgattctttggctgttgtccccccctccccgccccccatgtttcttctgcacatttaaaagcacacagaaggttgtgcagtgtgaacaatgactcttggcatctgggaaattgtgaggtgtgcacagggtttccgcccatgtgctgtcactgagtgtgtgtctctgggaacaagaaatgtgtgtttgtgttcacacgtatgtgagttccagcaaacacttgcaggtgcctggtgtttttctgcatctggcaccccctcctgtcttgtgtgtgtgttgaggactgtgtgccagtttctcacagcgtgagaatgtaccctgtactggatatgagacccatgggactgagttgtgcgatgtaggtccacacaaactcaggtttgtggcatatgtgtgtctgtactcttggctcacttcggcatgtcctggatggtggtggagatgtgagaattttccatctggtctataaacacagaaacatgtgaaggaaggtggtcctgccctctcttacagaagggatcgttctgtgacctttccttcacttattcattctttttccagaaagagtcctccacaagaaggagaacaggaagaagtctcagtcctttgtttctagaggccaaggaagtagaaggcagctcccccaaccccgccccaagttcttgaggcccacccctccctttctccctggatccaaggtctctgctcagtacagatttgacagagatgggcagacagccgatgtccctctccctctgccttagcccctgttcacggctgttcatcccagtaaacttcagaacactgtgagatacctaacactctccaaactgaggcagagggaaagggctgaggctctcaaggagcagtccactaaccaagcccttcctttaagccaaagcaagcttcactctaaatgtgacagctctttcctacatgttgcttgagctgatggatgcatgaacaagtgaatgagtctatttgtgagactctctggtgacctcacaggagttcactgccctaaaacctcttggcaaaccctccatcagggcttcctatcctgaggccaccatctattgctcactctggacgactcttccctctcccccaagtgtccaacacacttgtcaagcatctgctatgtctagggccctgggccgattgttgatgacatggaaggatctagaaaagccttgtttctgtttgcagggagcttggaacgtgattggggagaaaccaggcaaggcaaacaagatgacacctgtgtggtctcttccccccattgagtgactgaccctgtcctcgtatttccttggttttgaatgggagaaaggatgctgacttcattgaactgctgagatcctacatagaaagcatgccactcagaatgactcgggcacagtcactctctttgtcacttgcccactgtatacaaaaaaaaaaaaaaaaaaagagaggctgctagttatatactagccagagtttcataatagatatctattgcacagaatttcagggggcattgtccagtctggtttcttgttccacgtcattatgtatgtattaacttacactaccctgtttagttgctattgtaaaaaatgtctcagctccctggtgaagctcctcctccgaacacagcttgaagtcccagatctctgggcacattcggtgtggtagggaatccaatttgagcagtgtacatggcaaatgaaggaatgatagagagggctagaaggttacaggctgtggaaaagagaggagatggcagcaggggaggctggctctctgagcccacagaggtagggcttgcctcctgcaaggttgctgtgcacagttttgagggaagggcttggatagacatctacacggctgagggagtgtggagttctacatcatgcatctgcataactgtactcatgaaaattagtgccacagagaaactcacaccccggtgcagtgactaatgcagccatgttgaaatacgaaggagagagagtgcattgggccatagactcagctagttgaggctccttgctgccttcttagtgtgggattctggggcctagcagaagcaattacattctcatatagagcgcttttccaaggtgtgttttcatcagaaaaatgagacacagaacaatatacagagtgttatagtttggaagacaaagtaagtatagacatgtagccctcggcaggtatgaccctccacactcttgcccctggcccagtggaggccatctcactcagaaagcttcgcttccttgtgtctcttaagggcaggccacagcaatgcctcatgctgagactgaccctgtgtgcatgtgtgcagttcacgtctcagagccactacgggatgaagctgatgtgggtgttctctccttcagctctggccgatgtccagacaggttaaccctcaaatggcgctcactcaaaagtgtgtgcatgactctatctctgctcctgggtaatgctgtaaaaatgcctctctccaggaaaagggaccagctggtggcatgtggggaaagggcccctgtcctatcctcgtttcacagatgaggagtttcagaagtagggacactagcagaagctcacgcattggtagctgcttccagggcccaggtttctccctctgcgcctgttccccatggcgggcagttcttccagaatccagaagtggcagattctccaacacaggattgtggaccccattggaggcagagacaaagccacttaggcgaggaaggttgtagagggcttctctgaggcaggctgtcgttgatccaaggcaatggacttcaaggtctttccctggcatgcaggggtccagttctagctgattgcctcggtcactttgcatagaagagtcatttgtatacttgcaggggtgggcagctcagtgcctgtcaaggtggcctgctgtgacagccaacaaagtgccaacagcggaagacactgcctgtctttgtcctgtgtgtgattgatggtcctgatctgggctttcaagggccatggaacaggggccactggccctgctgggttgcagctgtaggcatcctgagctccagtctcctttacctcagcacagtctcctaacctctttgggctactacaggtcccggttccctccaggaacactgtaatgagaactacttctctctctttgttctagtttgatggtgacagtgcctacgtggggatgagtgacggaaatccagagctcctgtcaaccagccaggtgagtgcctgtctccaccccctagggggtctgagccttgggttggtggagccaagatgctgctggtgttgaggtaagaggcctgcagttgttggagtcataggacatggcttggtacagtcaaaccagggctacagtgctagctgtctttggctactgttgacttacagtgggcaccactgagaacttgacactctaagtctgttaccctacattccctgtgcaagggacaggtttcacaacagtgagttcaggtgtcccatggtctcggccactgccttcctcctgcacagcacttgtggggggacctggagagagtgtctacatacaggtgaggagattctaaccctcacacagaatcagttatctgaggccactgaggaggcagagggcagttttcccggaaggtcctcttcagtgatccagacctctggggccatagatggaatcagattttccaacagcaaagagaaagctaacatttcactacagcaagttaagcatcctcgcgacagactgtggccaggaaagggatccttactgtatgtagactgtgacaacagagagaatggcaccctaaggcaggagagcctgcaggatggcaacaactaaagatgctgaatgggaccacggagtttcccagctgctgggaaccttgaggagctagaggacaagcctggccctgctcttgattctgccttgtgtcttggcaactggagttggctgcctccggcccccagccatcgtgattggttcatatcttctggctggggaaagcaagcctattaatgcatgggtgtaggcaatgtaccttattctgtgacaggtccaagtggccataaatgagtaggatgtgggcctgtggcccgtggagaactctgctagtgaggaagatagtgcagtccaagtggcaaggatgctgatcgtggggtgccacaccccactcattctctggcctgcctcatgtgagcgatatcctgccgtcgcagagctgcctttgtgttgctatatcatgtgccagcctgcaggaatggtgagcgagactccaaggcctgggcgtgtcccagtgacaatgcttggttgtccagattcagcttgtcatcccaagggctcagagcttactctgagcctctttgagtccaagtccaagtccaaggccacactggacttgggagcaggctgcactctgaagtcaaaaccaacctctcacttccttagacagctgtttgtggcttccagttctgacgaggggctagggttgtctctcgtggcaccagttggttttaatttctggctcttttcactgtctgcggtcatctgccacacttgtgatgacttagatggtggctgacctccacacaagaccgtgacctccgtggcatgctgattgtgaaccataccctccacagagttgtgggtgtgacccagaaagcactccgggaacactggtgtcatgtgtcaacgtggcctccttatttatcctttgaacctcaccttccctaacaggagagcagggtagttaaggacttctcatgaattcttctaggtctttttgctgtcaccagagggtctgcctaacttaaaagagacattaggagctgggtgtagtgatattcacctgagctcccagcacttgggaggctgaggcaggaagatagttaagtttgaaactagtattggctacctagtatatatacctagtatagcaatattccatataataataataataataacaatgtatatacatagtacagcaatactccatataacaatagtagtaataataataatgtatatacctagtacagcaatactccatataataatagtaataataataataataataataatgtatatacctagtacagcaataatccatataataacaacaacaacaacaataataatactgtgagaataagtctagccagttgcataagccaaatttaatatcagcaacttaacaaatgtagccgtgaaaacttctcatagtgtatcttttcttttttactgcaaaataaggacctcacaatacagtggctaaaaactacaagtgtgtagatcgtttcgggttgtattagttggctccccccatatccctctcctcccaactcctccccgaaaccccaagcccctgccctcccccatcactggctagcctgaggctataaacatggcagggacaggttcccagagcagcaagtccagaagctgtcctccaccctcttgaggcccagacatggaactggtctgtcaccactcccagctccttctgatgtccaaagccaggcacaggacaagtatagattcaagcaatgggaacaagatgtcagctcttggaaagggggactgtaaaatactgcagcccttttgcaaatggctgtgtgggaagcagagaatctgaagcttatgctgaccttgttaatgaattaactcagcctcctcaggatgctgggcctctggtctgtctttaatggcaagggatggccaggaatttccctctcttttctctggagcctgtatttgaacacactcacatgtgcacgcgtgaacacacacacacacactttctttcacaaggtgttgtcttatcagctgtaggaattgtactgccccagttaatgtagaacccatgtgagcatgagaaaatgaaggtctcagaaactagaagatgtgatatatcttgtaagtatgtttacatcccaggttcagccaaacagcaaggttcactgggcaccttgtgattcagagaccctggatctgagccggaagccatttctagcaagcacgagcttctaatatgttccaagcagcagtcttaggacgcggcctaatagccatcagttctctcctggctgagagcagacccacagctctagggatctgtatgtcccagagctatagggatctgtacatccaggctgtgtgatctgggaagaaggctagagctctctcagacctggactctgttcctagcgcttctgtgcccaatatgggccagatgtctctctctatgcaagggatgttagcttcctcctaacagaaagagtgacacctgcctgttgggatcctgggagaagcaaatgagacagggatatgggttctgttgacaccgtatcagagtcccttcaacagtctaaggtatccaggtccagctgcggtggccgttcaccactgacttatctagaaaattggcctctgacaaatgggtcactgcagatggcacacacacacaccgcccccgcacccatgtaactcccacggaggctgagtcctgggccaggctgcaacctgctctttttcttatcctctaagctcctttctgtactgaatctctcagagaagtctcatctcaggctgattttgggtaaatctaaactaagagcctacgcaaaacaccagtgttcagagaaaccagccatgacttatttctattgtcttattcctgtaaataatgttctggttacacaagatgcgcgtctggtcaactctgtatcaatgcaaacatcgcttcctctgtgggaatcccctagacatcttggcccaacaaataatgtctgtcccttccaggtactgcaaatgctagtgtgtcatggtgcctttctgactgtgggtagttttctgattttatggctgtgaataagatttatacaaacgttttcagggtttttcctaaaattttgtgtgcgcgctcgagtgctcacgcatgcacgcgtatgtgtatacatgcgtctgagaaggggttggggggcagacaaatgggttgagactgatgacatgaggtttgctaaagctctcagtagcaggagtggacacagggagattgaggttgggtatgctttaggcaaatgaaggatccaagattatactacaggcagaagaaatggagacacgtaggtggtctgagatgtgattttgtaaatcaagctatctgattttgagactactagatgtagagaaagaagggaggaagagagatgggcaactcccagaatgtagtgtggctgtgccatcttctgctttggggaagggcaggcttgatgagatgggacttggtcatttgacatttgagaggcccatttaaaagcagttagatggctgtccaagtcaggagccattatgtaaaattgtgacttctgggcttgtggatcaaagccctgggaggataaatgaaacgtaagataagagagcgccaagtaatgatccccctgccatttttttgttctgttttgacatagaatctttctatgtccttccatagagccttagaagccacaggcagagtgttctaaggacagaaggttagggaaagatggtgttggatccacagcccctttcctgtccagagatgataaaattaaaatcgggcagagcagcacagaactctagagatagaggcaagaggattctacgttcaaggtcgtagtcagctgaatagcgagttcaaggtcagcctgggcgacacaaaagtgtctttaaaaaaaattaaaggcaaggtttctaatcaattaaagctttaaatgggctgagaaatcagaagtgaaccaataagtgtacctttactacacgttcctgttggcaggaagatgcttctagtggaagctttagaagaaaaggtttaaaaactagaccacaccctaacttgaaatggcgtttgcaataccagaacaccagagaggagatgcaggtgggaaactgggcacggatactcgaagttgaggaccaacttccttagtacataagacttacgagaaatcaattcaaacccacagtggagaagggaaggagatccgagccaaccatttaccgaaagaaaatacacaaaagaaaaactaaagctgctatttttttttttttcatctatctggctgacaacaaatcccaaggcttgatgacgcacattccctcaaagtccttcaggaaaacacattttatacattgttgtggagagtgtagactggtcctcatagctttttattggaagcctccttccagtagggggcagtggtggatgcccagaatagggaaaaaggcagaaacttggatctcaagtttttgcctcattcagttccctttgcctatattgttttcttgctgagcctcagtttccccattaataatcaggagagggtgttgcatttgtcccctccctgctacgcacacaaaatggagtagagaaatgactcggcagttaaaaacccttggttgctcttgctgaggatctcgggttcaagtcccagcacctatgaggcggctcacaaccatctgtaactccagttgcaggggatttgatgtccttgccttcttatgacaagggcaccaggcacgcatgtggtgtaaagccatacgtgacagcaaaatattcacacacactaaattaaaaataattgatgggctttaacatttgctgtgagcttcccagggcttaggcactggagtcaaaggtctgcttcacaccacacagccttcgttagttaggcacagctgtcccccatctaacaggtgaggaaaacgcctcagtggttgaggttttgtgaaaccaaaccacttcccagtaaatgtacgggtgggtaggcaggaggccttgccgccagggttgaaatctgaggctgtacgcttagtcactctggcttccgagtctgtgtacattgcaaagggcaaagatgacatggctcttattgctttaattaaaactggggtgaaggctcgagattcagattaaaatgaaattgtgtttcgcccgctgcggtgctgagaaggcaacggcagcgattacgcccgagattacaaacaatcaaagagaaaagggcttttgcaaccatttcctgttgaagccacaagcatcacactttaaaaataattacggctgtgttattggaacatgattcatgaattctgaataaatatgaggggcctgaaaggagaaaaaaaacggcttcaagaccatagatttgctttggatctgatgaaatttaatgtcatctcccagctggagagtaaaatgcagggaggaaataaaaccccaccctatgtacagggagaaaatggagtgtgtcacggggagctgatgtgcacacacccttccgaagcacgggctcagaaaaatgcacgagtctcccaggcttcactgaagaaaactgcagagagctggtgcttacatctctccagtcttaattttgcattctggtggctaaaaatacatttacgttaaagctctagattcctgcctgtgtgagatgtttcgataggagacattaggggacgtgcttagtggaggaacttgggcggtattcatctcagctccccatcataaaggtatttctcatacaatgcagtcagtgtttacagcctatagtttgtttccttccaactattatgagcaaaattgaatcccagggaacattcaccctttcaaaatggggtgggaacgataagaggaggtggggtggggtggggtggaggggctggcagtgtgttggtaatgtaatttcaagggttttcataaaaatggagcccctccccctctcccagcccatctcaaaatgactatgccctgtagggcttggctttatactggaggagagtcaaagagcccctggatttacgtatgtgctcattgcagtgtgcgagcttaccctatgaacaagagaaacatggccacacatagcgaccacctagaatggcattgggctctaagcttctgaaggctcgggagcctgaatctagtgtctgtgtagcctctcgctctgtgccatggggtgggtggtttgctctctccctaatcttctatatctgtgagtgggcacctctgaggaactttccaggttatctcttgtcacctggatattttcctcctctaccacgtgcccaggaatacccagaagggacaatgtctgcccatactgctagtgagtcctttgctatctggttaagtcacaccaattcagaagagacccggagatgaggtcgtcagtcagtggctttgagactattgtcaaatcaactgagactgcagtaaggaaatgtcggtgagacgggctcatcggggtgctaacatgaaaagtgtgggctttgaaaatgtaaccagctcttccaagactccatggcatctttaagacatccctcagagggatgtgggtaagagtaactaagatgcattggtacccagagagcatattcctgtgtctggcacacagcgcacagtagctagagaagtgttagttaggttcccatgttgctgaggttgcgtctgccccggatgtgtccggatcaggcatcagaaagatgagccaagggagcgcacttactcggtgaaaatcagattagggtaggcgttgaaattagaaagattttcgtgaaattatcttgctttcaaatgtgccaagaaagtccctagaaaaatcacaaacctagtgaaggatgcctcctgatcttttctagcccattggagatacgaatcccttcctacccagcatcctctgccacgtgatcgcagctcacaagggcacttatagtggttctgccttccatacgttccaagtctgaggctctgatgggaaggaaggcccaggagtgaggttgtgcctcagccaggcctggccttaccttcctgtcagttcctcaggaagggtagagcctggtgggcagtctatcccttgtgctccggtggcttcccagttctgcacatgtgaccgtgactggattcattgacctctcttggtctcactttctactgtaaaatgggagtgttaatatctagcttgtagagtagttaaagagacccacaaagcaaagtggggtaactgtgtgcccacagtgagccctctcctcagagaaagctaatttacagtttcgacatgagcagcagtgagggaggcaggggagtgtttgctcctcttttatggatgtttttgctaggactgtggcatggtgacttatcaaagcttatgttcggggtaaacagaagttcaactctgagaccctttagccagaatagtgccccaggctgcagaaatacatctttttgcttcatggcaaaatctatgtttataaacacctatgggcacctagcttggtgtgaggaagttggcttgtaggactgggaagttggggaactagagagctaggacactagggtgtgggtcctacagaggaggctaaagcatactgggaaggatgagggtgctccccaaactggaaaggatgaggcaggtggtctgagaggcagttctactttgcatctttcccataataaatggactctgaggagcctggagaggctcaggggctttgagacttggctctgccttactctcaaccatccactgcgctgagaccagggtactggatacatctgtgtcatgagtgaccattgagtagttttatccttacccccagtaagcagttattgcaggacacaacagtgacatagccaagaaaggcagcagggacattttaaagtttataaattcctgtgtatgtgcgcgcgcgcgcacacacacacacacacacacacacacacacaccacaagtagagaaaagtcagaaagtactgtattaacactggaggacccggtttacttagccagtgctgtgtcagctggtacaaccactttagaaaaccatttctcagtatcagtggctgaaagtgcagccccatgggccagcatcagctccatgagtgcatccgtgaggtcaccaaaaggcacatcaagaatgtccagggcaacgtttctcataaaggcacaaaggtgattaggcttggtggtacatggctgaaatcccagctacttgggtgactgaggcaggaggatagaaagctcaaggccagcctgggcatttttaaagaggaggtgaggctaggctgagaaggacgaaggagtccttgtgagtggctgccacgcaggaagttttgctttgcgacatgaagtagctgttgttaaaaggcctccaagaaaatgtaacttgaaggttccatcaatcacaaaatcagaattagaaaagggtagagggatactgctttgtgagagatgacacccatctggcgtgcaggagaccctgggctcagtcccaggcaatgtaaaataaagaaataaataaaattaaagcacaaaactggcaacaatccaaacatctatcatggggaggcaggatgaatgactagagactagtctgcccagggcatgctatacatcagtggcaatgagtgcttgtaacaatatgcagtacagtggttggctctcacaaacacattgagcaaaagcagccagagccaggggacagaacatcatcctgttggatgcctctgacacagagcacatgaatttgtccagggtcatggaaaggtgagccctggttctccttggagctccgcttctcagcctttctaacactgcaaccctttaatgtagatcctcaagctaccaccaaattatttccattgccactgcacaactgtaattttgcaactgttatgaatcataatggaaatatcagtgtttttcgatggtctcgggagacccctgtgaaagggtcaatcaaccccatccccaaagagattgtgacccacagtttgagaaccattgccttatctggtatgtgatggttttatatatgcttggcccagggtgtgacaccattaggagatgtggctctgttggagtaggcatgttgctgtgggtgtgggctttaagaccctcatcctagctgcctggatgccagtattctgctagcagccttcagatgaagatgtagaactctcagcaaatcctgcaccgtgcctgccttgatgctgccatgctcccaccttgatgataatggactgaacctctgaacctgtaagccagccccaattaaatgttgtccttataagagttgccttggtcatggtgtctgttcacagaagtaaaaccctaactaagacatggtatataaggccaaagcggctttgaagggtctggaggcaggagtggctaggagtctctcttttttcccttgagctggttgtatgcacacacactttgtgaaattttatcaatggtttgctggcgattttctgacttttcttttggtctcctgtgtgtcaataggaaggaaccacattgtcaagatgctgtattcttatggttgtctcttagatggagaacatttatagtattttgctagatcatatattagtaaagatgccaaattaaattttcttgattagcaagtgaaacatggggtagcattcttcttgggttctcctaagagcctcactttcaaccatttgtcttctggatgctccagtggtcctgtctgtgaggatgcaagacatggtcagcggtaaaggacactttgctgtgttgtcctgacatgggtctttatttaaggtgtttgcctttgtcgtgctcgtgtgcgtgtgcttgtgcgtgcttatgtgtgtgtgtgtgtgtgtgtgtgtgtgtgtgtgtgtgatgtatcactgtgtttgtttatgcttgtttgtgttttgggagcatgtgagcatcacagtgcatttgtggaagtcagaagacacctttcaattatcattcgttgtcttttcacctcgtgagaaccaagcccactggctttccagcttccaaagtgctgggatgacagatagacactcatgcatttacatggggactggggatttgaactcaagttgtcaggcttgtgtttcaggagtttttcaccatggagccaagtccacagcctttgtcatctaatctgactttccacactgggtcacatgtccctgctaatgtctacagaggggtgtcgcatactaccttcctaccttcaggtgtcactgaagtccactttacaatcatggtcatccagaaggaaagaaggcatagatctgagacaaacacaggaaaggtctgtctcgtgcttcagtatacctctgttcggtagcacccacctcaccgcccccacctcaccgccgcgccgacacggtgcttcagggtctttatgaggaggtgtgagaagtgatgctttgaagagaaaccgtctccaagacaagtttcattcaggtgtctctgtgtagagcctggccatgacagggaagggaaaggcttggtcatttatagcttgggcaatatgttccccctgggagccaggctggactcacttcatccagtttgcttaacctcacgggaggcaaattttcttttagctacctgatggactgtgctgtccgccatggctctagcaatggcttgccccggggaagcagaagatgggagcttcacccagagcttcctggcagcactggctgtggcctgtacagccaccgttatgaacagagtgttcggatcacagttgtctctaagtctgtacgtgtgtgtgatggggtttggtgatgatctatatactgtagacctggaagatctggctgatagaatatttgaggatgtctgtagaagtttctctaggccaggtgtatgcacacacatggacacacacacacctgtatgcagacacacgtgtacacaaatacaagcacatgtgcacacatgcacatatagatatagtcacccacaagcacctctccacaggacaattgctcaaccctcagtgctttggtttcttcagagaaactgagtctatagtcatgcgtggtcggggccgcggtgagcagggctcaaccacgtgtgcttcatacactcaaggttgaggttcttattttcacagaggctgcctccctcctaacccatgagtttctggagacatggcctctaggagtagctgagttaatgcctggtcagtgcgagagagagagagcagttcccacaagcccactggttcagatgccaatgtggatttttctcacaagttcgtctgtgaagggacttatgtcattcattaggcatgccacctgtagagatgggtgcgtgcaagtgtgtccagactcaacacacaggagggtgggttcggctatagtttgaggactctagattgggttagaatgtctctaacctacccattggctctccctccctccctctctccttccttccctctctccctttcttccttcttttgacaaggtctcacgcagcccaagctaagccacaagctccttgtccacatccatctcccaagagctcgggttgcagggtgtgcactgccacacccaacttggttctaaggagctgcaatttcttctgtgactttcagaaagtgcttcttccttgatgaggtcaaggactctccagccagaacgtgatggagctagactttgaaccactgtctgtctgtggcagagtctatgctgttgctacctcaagccatggtgcccacagggttcctggaccagcagcaccccagagcttctcagctccagccacccccacagagagtcagggagcattttgaggtctcttttgtgtgcacagtactgacctagaagtgtggtacaaggagcactgcctaccctagggattaggcaggtagagggtgcctgtgcccaggggtgtctaggctggattagaacaggcccacactggcgggggggggggcagttaaaaatggaagaaaaggataagacataacacagaaacagagcatacacacggaggcacaagtcccgagtttgtaaagtgacagaactacatagtcattaagaataaaggtcctaggctcatgtgggcaattaaatgagaccttttctcaagacaaaaagggggtgggggtggtggagactggagatatagctggttgtagacttactaagtgctaggcattggttctagtacctcacactgtcacaaaaacagggctggtgacatggctcagtgcttaacatgcaagcaagaagacaggaatccaggtccccacaacccatataaaagttgggtgggcatggtgccccacctagacttttagccataggaggtagagactggggatccccaaaacaagctgactagtgagaaaggccatatagatgtgctctgggtttgattgagaaatcctgcctcactgaataagatgaaggaggggggtgactttccggcatcacacagggatgctcctgtacacatataaacatgaatgcatgcatgcacacacagcacacacagagatgcatgcaaaagaacatatcttaataggaatatttaataagagaatgtgaacacacaagccagattctttttttttttttaaagccaacacaaatctctccctgccagttccggattttggtgtggctcagctgggtgcttctgtttcaaggtctctcaggaagtttaatatggcagtcagggctgtgggctagtgagagggtgccgctcagagggagaaccaccgccaggtctctttgacagtggccattcccacagccagttcccctgagctgactgtcaggttggtccctggctccatttcgtccgtcttggatttggggtaagttgctgtctcaaggttggtctttgtctacgaaatggctagagtgacagcagccgctgcatgggtggtaaagttcacatatgcatgcgacagagcaggcccttcacacagggcgcacgctgtacaaatgcttactgtgatcattgtattttgaacaaagctgtagaagagtaggaccaacctgagagcagagtcacctcctcgtgagtgactcaacaggttccagctccagcctggcattgggtgtgtgctcagtaaatctcaagggagtggatgagcttcaggctacaaccccataatgaggatcgtgtagcaggagcatggggcccgggtaacaggagaagcaggcctttatctattcctttcagagtttgccctctgtgatggccccactctggctaggcccagtcaatgagcaagcaccagctgggaaggcatggagaaaggcaagggctagaggcctgagcagagggcctagaggtgcccatcccctggaggccctgtggctggtgtcaggggaggctatattgtttggtccaagcaccctcaatggcaggacagtgcaggacctagatctgaaggtatccaaccttacagagtgtgtgagctctcctggggtaatctgatgtttgcatctgtccggcctagccacaatcagggcacacacaggagccttgttctgacaactcctgcagctttactctggtgctggctaggcacatttttttttaaagattaagctacttctgtagtttccaaaaggcagggatggaaaaggaaagggaaaaaaaaacccagcaaagagacataatagccatttttctggaagctattttagtacagaaaaagctagaaagcctgctcatcagttttaaatgctttcaaaagcagctctgctcaggtctgcctaccgacctacaaggcaggcccaggagcagaagtggtgtctttgttaccccccccccccccaagccagcttcctttttttttaaaggtggttttgttgaggcctggagaggggcagtgacttggctaaggtcatagagccactcctgggactcatgaaaaggtgatttctaagatgaccacggacaagagatgcccggggcccaaattagaattcccggcagctcctctcagggcaaagctgattcccagccccccttgcttctgagaactctgtgagtcactggtcctcatttgtacagatctccattcaagtccttactgatgctggtcagggcaggtacgcgcctttaatcctgcctggcacttaggaggcagaggcagccagatctctgtgaattcaaagccagtcagagctccatcatgagactcttgctgactaagtgcctactatgtggtgggccagtggagcagctgctaagatgcggccctgagcgctccttctccctcaggcactaccccgtctccacagccccccgcacccccgcccccagccagtcagtcagcaacaaccagcatggagcacacagtagcaaacaagacactttgctttgagaggtggaaggcaagatggagtcagaggttgtcctctgacctacacacagcatgcacaagactatgcacaggtacagtctaatcttgtcacagatcagtttgaccaatgcagggcctgacctattccacagtgggcaggccagagcaggcagctgtctcagggccctctagttggtttctcctaaaggcccagcacggctctgggtctcctgaaggctcaatatggaacagacagacttggctccagcccttctggacccttcactttagtataagagatacacaacgatcaggaaaaacccagagagggtaagaaatgtcgtgaaggaagaagcagaggctataagggaaggggagagacaacagataggagtggcacgataggatttataagtaaatctgttgtccagctgctagcgggagaggaacagggcggatgaaaggccatgaaggagctgatgtcctggggaagtggcgaccagttgacccagggaggccacctagccgatggatcatagttgggctggtgtgatatagtgactttggtgtgagcaggcctttggagctcactggagtaggtgaaatggagggagacaaggcgagggatggcaccttactctaggtttttgggtgtgagtcatcaagtagagaagcagtgagaaaggactacacttggtgggaacagggacaggaaggacctcagttacggatatgttggcgctccttataggttaggatacaggtcagcaaaccatggcctacgggccagatctagccctccttctgccctgtgtaaataaagctttattggaacacagtcacagtcattactttcaatatcatctatgactgttttcatgccacaagtatccaagttgaacaattgtttcaaatatttattagctggacctttgcagaaaaagtttgcttagtcctcttctaggatacccaagtaaaaatttcaagagacaggtgaatatgtggttataaacatgttattcaaacagataggagatgtagaaatggctccctggttaagaacactggctgcttttccagaggacccaggttcgattcctaactcctacaactgtctataattccagttccagaaaagctaatgccctcttctgacctccacagacattgaacacataaggtaatacatacatacaagcaaaacagttttatagattaaaaaaaataaaaactgaaacaggtattcaaacagagaaataagcaagcagtgctgttcctaaccatggaagtgagagccctcctcttcagaatggtgacttccttgtcagactgcttcatctcattccaaagctggggcccccagagtacccaagccatctgagttctgctgggactatatcttacctacaaaggaagtcccaaaccccaccaccagcaccccatcttttcaaagccctttcctcccccaagataaatgacccaggaaggcccctgaaccattgagtccggtcatttcttgagccagaactcatggtgctaacaggctccttcctatacgagcattaataaacaaagctcacaagctgtttctgtcgttttcaacccaagaacaacagggctaggcactgctgtgaagcagcggtggctggcagtgtccaaaggtgttggacaccctcctctggatggtcctactcaactctgagtgagatgcttcctgtgaataaagggttaacagagtgccatgtttgcatagtgctctttcctgctctcaatgggttaatatatgatacaggctttatctagctctgtctgtctgtctgtctgtctacctctcaagaagcatgttgagtgcaggaaggtggcaggcatgatcactctgactctctagagtagctcagagctccatgtgctgtgagacaccaatcaggaagattctattaagcatctcaggggtgggtgacacaggggtgcattatggacatggacacacttgacaaaactatgtttcattccccgagggatttttaacccccttgtatgcatggcaaactggttaagggttgagatccccactctagatgctggaacttgtgtgagaatatttttcttgttgaaaacacatcagaatggtgagttatgcaaccatccttcggctcagatgcaccttcagggtgcagggctttctccgtctggaccagatcagattggtccatgggcatgtctgtggggaaccgtcttaactgttatctgatgtaggaagatccagcccattgttggcggcatcattccctgggctgtgtgagaaagctaagctgaacatgaacctaagtgaaccagaaagcaacatttctccaaggtttctgctttaggtccctgcttgagttcccttcttggcttccctcagtgatgggctgcaacttgtaagctgaaataaactctttttctcccctaagatgttttgggttggttatacagccatagaaaggatactatgtatccacagggaatgcaactagaatacccgtgtgtgcctaaaggagactaagtcagcatcccacagagatccctgcaggtccctgtttctgagacccagtttgcaacagccaagcattggtttgatctaggtgtccatcagcagatgagtggctgcacagtgttttgttcaggaatcctcctgtcctcactgaccgcagcacagcagctacagatgcaggtagccgtatccaactttttacaagagtaccgcagatccgaactcaggtcctcatgattgtgcagcaagcccctgatacattgagccatctctcagccccctggctaatttttagttactttttctcaggaaactaactgtatcatatatttcttatctaagatgtggtttctgctttgttttcctttcgtctactgaccatttagttgctttatnnnnnnnnnnnnnnnnnnnnnnnnnnnnnnnnnnnnnnnnnnnnnnnnnnnnnnnnnnnnnnnnnnnnnnnnnnnnnnnnnnnnnnnnnnnnnnnnnnnnnnnnnnnnnnnnnnnnnnnnnnnnnnnnnnnnnnnnnnnnnnnnnnnnnnnnnnnnnnnnnnnnnnnnnnnnnnnnnnnnnnnnnnnnnnnnnnnnnnnnnnnnnnnnnnnnnnnnnnnnnnnnnnnnnnnnnnnnnnnnnnnnnnnnnnnnnnnnnnnnnnnnnnnnnnnnnnnnnnnnnnnnnnnnnnnnnnnnnnnnnnnnnnnnnnnnnnnnnnnnnnnnnnnnnnnnnnnnnnnnnnnnnnnnnnnnnnnnnnnnnnnnnnnnnnnnnnnnnnnnnnnnnnnnnnnnnnnnnnnnnnnnnnnnnnnnnnnnnnnnnnnnnnnnnnnnnnnnnnnnnnnnnnnnnnnnnnnnnnnnnnnnnnnnnnnnnnnnnnnnnnnnnnnnnnnnnnnnnnnnnnnnnnnnnnnnnnnnnnnnnnnnnnnnnnnnnnnnnnnnnnnnnnnnnnnnnnnnnnnnnnnnnnnnnnnnnnnnnnnnnnnnnnnnnnnnnnnnnnnnnnnnnnnnnnnnnnnnnnnnnnnnnnnnnnnnnnnnnnnnnnnnnnnnnnnnnnnnnnnnnnnnnnnnnnnnnnnnnnnnnnnnnnnnnnnnnnnnnnnnnnnnnnnnnnnnnnnnnnnnnnnnnnnnnnnnnnnnnnnnnnnnnnnnnnnnnnnnnnnnnnnnnnnnnnnnnnnnnnnnnnnnnnnnnnnnnnnnnnnnnnnnnnnnnnnnnnnnnnnnnnnnnnnnnnnnnnnnnnnnnnnnnnnnnnnnnnnnnnnnnnnnnnnnnnnnnnnnnnnnnnnnnnnnnnnnnnnnnnnnnnnnnnnnnnnnnnnnnnnnnnnnnnnnnnnnnnnnnnnnnnnnnnnnnnnnnnnnnnnnnnnnnnnnnnnnnnnnnnnnnnnnnnnnnnnnnnnnnnnnnnnnnnnnnnnnnnnnnnnnnnnnnnnnnnnnnnnnnnnnnnnnnnnnnnnnnnnnnnnnnnnnnnnnnnnnnnnnnnnnnnnnnnnnnnnnnnnnnnnnnnnnnnnnnnnnnnnnnnnnnnnnnnnnnnnnnnnnnnnnnnnnnnnnnnnnnnnnnnnnnnnnnnnnnnnnnnnnnnnnnnnnnnnnnnnnnnnnnnnnnnnnnnnnnnnnnnnnnnnnnnnnnnnnnnnnnnnnnnnnnnnnnnnnnnnnnnnnnnnnnnnnnnnnnnnnnnnnnnnnnnnnnnnnnnnnnnnnnnnnnnnnnnnnnnnnnnnnnnnnnnnnnnnnnnnnnnnnnnnnnnnnnnnnnnnnnnnnnnnnnnnnnnnnnnnnnnnnnnnnnnnnnnnnnnnnnnnnnnnnnnnnnnnnnnnnnnnnnnnnnnnnnnnnnnnnnnnnnnnnnnnnnnnnnnnnnnnnnnnnnnnnnnnnnnnnnnnnnnnnnnnnnnnnnnnnnnnnnnnnnnnnnnnnnnnnnnnnnnnnnnnnnnnnnnnnnnnnnnnnnnnnnnnnnnnnnnnnnnnnnnnnnnnnnnnnnnnnnnnnnnnnnnnnnnnnnnnnnnnnnnnnnnnnnnnnnnnnnnnnnnnnnnnnnnnnnnnnnnnnnnnnnnnnnnnnnnnnnnnnnnnnnnnnnnnnnnnnnnnnnnnnnnnnnnnnnnnnnnnnnnnnnnnnnnnnnnnnnnnnnnnnnnnnnnnnnnnnnnnnnnnnnnnnnnnnnnnnnnnnnnnnnnnnnnnnnnnnnnnnnnnnnnnnnnnnnnnnnnnnnnnnnnnnnnnnnnnnnnnnnnnnnnnnnnnnnnnnnnnnnnnnnnnnnnnnnnnnnnnnnnnnnnnnnnnnnnnnnnnnnnnnnnnnnnnnnnnnnnnnnnnnnnnnnnnnnnnnnnnnnnnnnnnnnnnnnnnnnnnnnnnnnnnnnnnnnnnnnnnnnnnnnnnnnnnnnnnnnnnnnnnnnnnnnnnnnnnnnnnnnnnnnnnnnnnnnnnnnnnnnnnnnnnnnnnnnnnnnnnnnnnnnnnnnnnnnnnnnnnnnnnnnnnnnnnnnnnnnnnnnnnnnnnnnnnnnnnnnnnnntgctttaggtccctgcttgagttcccttcttggcttccctcagtgatgggctgcaacttgtaagctgaaataaactctttttctcccctaagatgttttgggttggttatacagccatagaaaggatactatgtatccacagggcaatgcaactagaatacccgtgtgtgcctaaaggagactaagtcagcatcccacaggagatccctgcaggtccctgtttctgagacccagtttgcaacagccaagcattggtttgatctaggtgtccatcagcagatgagtggctgcacagtgttttgttcaggaatcctcctgtcctcactgaccgcagcacagcagctacagatgcaggtagccgtatccaactttttacaagagtaccgcagatccgaactcaggtcctcatgattgtgcagcaagcccctgatacattgagccatctctcagccccctggttaatttttagttactttttctcaggaaactaactgtatcatatatttcttatctaatttgtggtttctgctttgttttcctttcgtctactgaccatttagttgctttatttggtttttctgtttctgcttcttcaacagagtgctgaatacattggttttacctttctttttttttttttaaagatttatttatttattatatgtaagtacattgtagctgtcttcagacactccagaagagggcatcagatcttgttacagatggttgtgagccaccatgtagttgctgggatttgaactccggaccttcggaagagcagtcgggtgctcttacccactgagccatctcaccagccccggttttacctttcttatcttctgtttttgtttggttgtttgttttgtttcgagacagggtttccctgtatagccctggctgtcctggaactcactctgtagaccaggctggcctcgaactcagaaatctgcctgcctctgcctccctagtgctgggattaaaggcgtgtgccaccactgcccggcgcctttcttatcttctaagaaagttatttaagtaaaaggtattaatttcccattgttcgcatctcagcttttgctaaggtaatgtttatatagtcagaagagggttgatcccagggactgatggctagggatggttgtgaaaccatgtgggtgctgaaaacctaatctgggtcttctacaagatcaataagtgctcttaaccactgacctatcttccctagccactgagcaatcttccctaaccactgagccatcttccctaatcactgagccatcgtcccgtcttccttattcatttgttcctggttgacttgtcagttcctgatgagatgtgttcaagtgtcttcctttgtttatggttttagcctgtttttctcccctgtcctgatatttgtttatttgtttaaatgggggcttatatagcctaggctagcccctggaattcacaacgcccagccccctaaatgcttggatttcaaatgtgtgtcaacccttccctatttagttttctactttattggtttttaatattttgtactcctgtagtttattagcgttcgtgaaagtttatatctgtcacttctttgtagattatgtcatttgtcagcaaacatcttcctctaagtctctttaaggtcttgctctgattttgtccttaatttgctgttaattttgcctcattccttttcatttgcctgatgacatctgttcactgttaaccattcctgtcattttatttggagtgggtctgttacaaatgttgcctgctagacacatttatttaaagtggaaacattgagttttatctctgggaggccagttgagattccagggctcctactgctgttgatacttcatcttactgctgccatgtctaaggttctctctgagcaccactgtagtcccagcctggatcagaccgcggtttaatcaagttctggtgttgtgttgttgttgttgttgttgttgttgttgttgttgttgttgttgttttcctttagtggactgtctgctttcccagattataacagatgttaataaatgaacctggcaaaggaacatggaaatatcaattctgtttctataaaccaacaatgagtgatcctctccccccaaaaagaggaagtctttccacaggcaatagcacccagaaatagaagatgaaaggaataaatttaaccaaggatgtggaagagttataaatggaaagctataaaacccccactgaaaggaactggaactaaagatttgcacagtgcaagaaggctgccctgtgtgtggccattgcaagctatcatggatgcctacctgttaatacagttctgtcagatttgtacctatcttttgttctagtttgctttctctgtcactgtgataaagaccaggaccaaaagcaactcggagaggaaaggtttatttggctaacaatttcggcttacaatccatagctgaggaaagccagggtaggatgcaagcaggaactgaagaagagaacatggaggaaggctgcttactggcttgctccctctggttcatgctcagttttctttcttgtacaatccaggaccacctgcgtaggagtgacaccacccacagtgggctggttcttcacacatcgaccatcaacaatccagacaatgccccacaggtatggccacaggccagtctggtctgggcgatccctccattgagacgccctcttctcaggtgactgttggttgtgtcaaggtgataattcagagctcatcaggacacttttacttcagaaatggaagaaacaagtgggtctgagaattcacttggcatttacaagttataggactcacagttgctaatttctttaagcacaagtaatgtggtcttagcataaggacatgtagatcagtggaataagcttgactgtccaagttgaactcatgcatccgcagcacactgagttttggcagaggtacctggaccacttcgatggaaagagcagtgtcttcaccaaatgatattgggacaagagaacaatcacatgcaatataatgaagccggactcttatctcatgccgcctacctcaatacaacatctaatgtcctaaatgtgacgacgttagcgccatgagcacagcaaaggagtgagctttgcatcaaccgagttaaagtggaaggatagaaagccagacaacccaacctgaactaggaatgaaaggctggaatagacctgctctaaagcagagcttctcaacccgcaggtcgcgacccctttgggagggttgaacgactctttcacaggagttgcatatagatagcctgcatgtcagatatttacattacagttcatagcagaagcaaattacagttatgaagcagcagcaaaataatattatggttgggggccaccgcaatgaggaactgtattaaagggttgcagcattaggaaggttgagagtcgctgttctaaagattcagatgaccacaggcaaagatagtcaatgttgttggtctttaggaaaacacaagccaaagccacaagaaaatgctactatatatcactaggatggttgtcacggaaacattaaaaatcttggcaccgagggtgtggggacattgaaattctcacatgttgtcagtgggaccgtaatgatccacaaacactgtggaaagttccttgaccagttctccgaagtcaaacagaaccttcacatgacctagcagttccactcctgtgtatgtctggaaaagacactcaaacaaatatatgtacacaattcttcatggctaccctactcacagtagcccaagatagggagagacttaatgccatcagtggatgaataaacaaattgtggcagatccatagtgggacatcttagagccatgaaaaggaatagagctctgatatgttataaatctcaaaacacctctctgctaaatgaacattatgtaaaatgtgttctaagcagaatacagatgctctttgaaaaacttaatgcaaagtaaaagatgccagattccatttacgttaaaacaggcagaatagataaaaatttttagagccagagagaaaataagtgtccatctgcagctggtgggggagggagccaaggggagcagggagtggaagcctgataggaatgacgtcttacggaagggtgataaaaacgcttaagaaccagcctaagctgacattgcatggaccttgctgtaaatgtacctgtggccgctgaacattatctgggacctcagtcaattttagtcattgtaacaaatgtatccaagcttcaaatttccttgcggtcaaaatgatgcttcggggtcagtcacctcttccaataaaccctgcattgctcctctgctccagttttaatctgaaactacacttctgtcttagcgcgccttcctggacagccaccagtttagacagacagacagtgcagtggttttcagctcagcgatgtgtctggaatctctcgggttcctctcatcctccaggccctgactttgagactctctccaagagagagttgactgaacacttcagaacttgtcatttcatgttatggtggtgatggagcttagtctaagaatttggtggaccgatcactgatttagtgccccccttgacagcttcaccactgcctgaagcttgacctttatgtcctccctgcctccagcctgcaacactttaagtaggggcttctaagagttctctattcatgatcctttacacgcaagaacatgtcttagaatcccagttacgtatgtatatgaaatatgtgtacagattaaagttactgatagtaaatcaccaagcaagtggttttaaaacagtccacttaatagtaccatttattagccgggcagtggtggcgcacgtctttaatcccagcactcgagaggcagaggcaggcggatttctgagttcaaggccagcctggcctacaaagtgagttccaggatagccaaggctacacagagaaaccctgtcttggaaaaaaagtagtaccatttattaaagacaaaggcaaatttgtatactaatgagatggggtgggtttatttatttttacacaaagaactggatcctgactgaacagtcaatagtgcaagacacagagcatcttcggtgttccttggaggtgatggctgtttttactaaggatgccactttacataaattcatagtatgtaagagcagaatatgtttgggaccatttcagaaatcgctggaaactaatacatggaacatgtacctgaagagatcgtgaggcctcaccaaattcctccttctgtttctcggccactgtgaggttagaagctttccttcaccgcgagccccatcacaatgtggagagtttctacctcaccataagcccaaggcagcaaagcccggagaacatggactgaagtcacagccaaaatatatgtttgccgcctccgccccctcctcctcctcctcctcctcaaaaaggaaaagaaaagaaaggaaaagaaaagaaaggaaaagaaaagaaaggaaaagaaaagaaaggaaaagaaaagaaattgttgaaaattctgccttaattccaagtcaaattcattgaacatttttttaaaaaaattcaagtcagtagctcaaatagtaatgagtaattacagatagtaattaaaaattactatctgtaattaaacttcccaatacaatacaactcaagtagactagtttgaagcttacatgctgaggaacgagggtagaaaaacatcaaggtccctgttttccagaaaccactgtgtttctgtaggagcagcagactctgtccaataagaatgcacacggtagtccccggtttgatccgaagcattttaagcagtcctcgctggtgttgctggtttgtcacagtgcaaagcacgtgagttgtgtactcagaaccaagctgcagtgaagccacgtgaggtgacacgggtatcagctgagggaaatatccaagacttgccgtgcatttgattccgagtcattcatttattcattcatttatgtatttatttatttatttgtctcttgcatggtcagacttcttttactcttgccaagtgttttagggataagggtttgtatcccactgtttaagaagctaggctttgaggttaggggaatagctcagttgacagagcatttgcttgatatgcctgaatctgtgggttccactctcaacactacataaacagggtgtagtggtgcacacctgtaatcccaacacattgagaggtagaggcaggaggatgagaaatccaaaggcaccctcggctatgtggtaaagtcaaggctacatgagacccttaccatataaaacaaaatataaaaggaaataaaaataataaaataagattcataatgctagactttaagatccctcctcccagagattccaaggggagtcagctctcctccaactctatagttagtcccaaatcattagaatgggcccacactcttcccttctttgatctgggacatgaaagataccactgacagcctttctgtgtgttccagagctcttaggcctcatagccaccttgctgctgctctctggatattcatgaggccccacagtgaggagcaggttgtcatgttgagcagcagatctcttgcacagcagggtctggaatagggtcttcacgaggtgacctagtgagggggaatgctggcttcagactcatgaagcctaacccagagactccaggttccaacacttctttcaagctctgaactccaccctccctgactgaaagacagaggtggtagatgtgtcttttcagaatagacgtgtttaaaaggagagtgtagggaaacgccggaagctgagagaggcacacggtggggactctgtgtaaatcagccccaggccaagctggcttgtgctcaatgtttgggatctgactacccccccccaaaaggcaagtgtgtgtttgcatgcttatttttaagtgtgctaattgcttctttagaggaattgtcataatcatgttatttcaatattttgatacaacacatgctgatttttctaaaaggcttctggtcggttgggtaagttccagagccttgaggtttgggtttggattaaaaaggatggagttctgtggtcatttggcattccctggcatccttcccagtgtcagaaccagttctgaatgctggaggacagggagggagggatggagggagggagggagcattcaatagcatgagacacaggttctaggggatggttgtcttctgggaggggcagatatgggaacacctgcgtgagacttgaacctagagcctggagcagtccttatggtgagctcagccttgtattgtaacggagttctttctaggtgtcaatcactgctctaggtactgggaacaaagggacttaactggagtcttcatggggcctggggcattgggggaggggtatacaagctgaaggtaaaaatgagccacaaacattaggtactgagcactatgggagacttgtgaaagtgccactttccaaaggtggactggacagttgagacggtgactctgaacagaaaggcaggccaggggactttgcactctggagtaatgtgatgtccatggttgcttccacctaaagacacttgccccttcagctcatcttggtggtaaggctgaagacagacagtgacccacagtgcatggagcggtttgtgtggcacatgggttaagggatccagcaatggagatgctgagtcagcgagctgctagtacccgttctgtgtctttggagaggacccttaatgtggaattccaccaagagcagcaagggtagcagccctgagccagcaatggctgggccgtgtgaggacttacggggtcatgtttgagactaaggtcttgaacccagaggcagtgggatgtgtgcctgaaggatctaaaccagcttagttgcacatccatggagtattaataacaatggaaaagatactgagccagcctagatggtggatatgggaaaaacagtaaaatagatacacagcaagagttttactcacccatgaacagtgacgtcatttgcagagaaaagattggaagtcgagagttaaatatccagactcagctagatatcatctgttttcacgcatatatgaaatttatattttaaatatatattatatatataatatgcatgtatatgttacatgaaagtagaaggggctaagctatggaagcaaaggaatcggtaacacacaatgatacacctctgaaagtgtcataacaaaacctatgatttttttttgcactaactaaaactttagccataatgacaaagccagggagctgcatgtgaagtgggagtagctccgtgagatgatgctctttagagatcatctgcctacaggagggagtagagggataagagagggctgtgggggaccaggaggaggctgtcattgtccatggtggggaggtgggaatggactgggcagattttagaagtattttggagtagttctgatggaatggagaggtgagtggaggggaggggcaggtttgcggatagagggtgatatcatcagaggaaacaggtgcaaggtagaggaagggaacgttgggtattgagatgtccagctgcggtgctcagggaagcagcaagaatggaggatggatgtgacacccagggggctttgaacacgaggtttgttgaggtcatctgaaagggagtgtaagagggaaagagaagagagctcagggctgaccaggacaactccaacataagaagaaagccaagggaagatagcaggtagacgtgggccaccttttccaggtttccagacatcttacccagctgtgtggtgactccacaatagccctgcagagggggccaatgagcgcaaggcgatgttggagtctatggcagtaaaaggcaattttcactctttcccaggccatcataaggtccttaaacagtgtctgaggaacatgaggtacatgctacacgtccctgcgctgacacagcccgactcaaacctccctatactcatggcttcatccaccagtccttgagaagcgggcactgttatagacatgcagggaagggatgtttagttgtcatgctgggttcacagagcaatacagaacgataagccatgtctttcctccatccacccttgctctggggaaagagcccgggaccatacaagtgctgagcaagaactctgccaccaagccatgtccccagtcccacgtgctactgtggctcaggcctttctttccctctctgcacacacatgttgatgaaggttttctctatccacaaatacctttggggtccttcatcacttctgggatatcctcaacctttacctctgccccattaacacagaatccatgacatccgcctatcctttgcgtctgtggtggatcctgggtagtttcttcagctctgtcttcccgtttacatagctgtcttctgttgactctcatctccagagtatagggatggaggactaactccccaggctgataacaaagccaggtataggcaggagcagacagggagactgaagctaatcccacactagaatccggtgtgacagtcctaaccaaccaagtccaacactgcccgaagtgaaagacagagcagaaccaagcagggtttgttctagggatgcagggtgttcaataagcctgtaatcctagcactcaggggggctgagacaggaggattgctgagagtccggggctacagagtcaacccgttctcaataggaagggaaggatgggggagtggactaaagagggagaagataagtctgttatcacccagactgggtgaactcgagaagggcatcggagtccttcagtagattcggggggaatagtttgatgcaattaaaatttacaataatctgagccaccaagatgtctcaggggttaaaaactcttgccaccaagcctgatggcctgagttcaatacccagagcccacacaggggacagactcccacaagttgtcttctgacctctatgtgtgcactggggcacacgtgtacacacacaaacgtgtacacacaccggcacacatgcaaacacacacacacacacaaatgtaattagcaatttaaaactcatgtacggtttttaaaaatttactcaccctgactattgtggagttccccgccctgccccgcccactgaagcataatcgggcatgtgccacaaagccagggcttatcaaggtctgtggtaaaacttgggacaaggagaaaggcagatttagtgctatgtctactagcttgtcctggggtcactggccagcccacatgggtgggcaaataacccagtaagactggaggtggcctcttagctgctaatctgcttcactcacactcaccaaggaaaggaccaagagaagtcctggctacccaggatgcctaaggggaaaactctggctgcccggagctccagtctctagctcttctgctcatcttgctcattcgttctccttggaccaggccccccccccacctctgtaaagtgggtggccaagggagctctcaggtggctctcaagtggctgtgggccaggtgtgctggaaatcgggaaaagatgcagggaagcacctttcaggagtccaggctcttgtctgcagagcctctgtgggagaaagattcactgaggagctgagcaggcatctaagtcagctcactaggctttcattggggctatctcgttgccaaggggttagcattttttcccatggttgctgttggggatgctattgaatactttctgtggttttgagacactgaccccacccctacccctctgttgttttcagacctataacagccagggcgagagtaacgaagactatgagattcctcctataacgcctcccaatctccctgagccatccctcctgcacctgggggatcacgaagccggctaccactcgctgtgtcacggccttgcgcccaacggtctgctccctgcctactcgtaccaagcaatggatctccctgccatcatggtgtccaacatgctggcccaggacggccatctgctgtcaggccagctgcccacggtgag

SEQ ID NO: 3079 - DNA, 451 bp, Mus musculus
tttctgtgctgattatgcagcagcatctcacagaggctgtcgcaggcgcgttctctcgctgcctgggcttccgtggaatgaggctcaggctcctcacgagacactggtgcattgcaggtgcgtctctgcagaagtttgatggtgacagtgcctacgtggggatgagtgacggaaatccagagctcctgtcaaccagccagacctataacagccagggcgagagtaacgaagactatgagattcctcctataacgcctcccaatctccctgagccatccctcctgcacctgggggatcacgaagccggctaccactcgctgtgtcacggccttgcgcccaacggtctgctccctgcctactcgtaccaagcaatggatctccctgccatcatggtgtccaacatgctggcccaggacggccatctgctgtcaggccagctgcccacggtgag

SEQ ID NO: 3080 - protein, 150 aa, Mus musculus
  VARIANT 150: Xaa = Any Amino Acid
SVLIMQQHLTEAVAGAFSRCLGFRGMRLRLLTRHWCIAGASLQKFDGDSAYVGMSDGNPELLSTSQTYNSQGESNEDYEIPPITPPNLPEPSLLHLGDHEAGYHSLCHGLAPNGLLPAYSYQAMDLPAIMVSNMLAQDGHLLSGQLPTVX

SEQ ID NO: 3081 - DNA, 530 bp, Mus musculus
tgaacagcgcgcgtgggtctccgggcggtcgggacgtagacgcgcgggctccgcggcgctgcgtggtgagtgcgcgtcgggtggctggatccatgaccctctgggggtctgtcccttccctacaggctgtccgcgcagcccctggctgcggggatgttgtcgggatgctgcagcagccgagcgtccggccgatcgctgggcctccggggctgggcctctctgcaagtgcatcctcaggccctaagggagcggctgcggccgggagccctctgcagttcgccctggtccgggcggcgcgggccacgcaggccggggcgtcccggggcggagtttgatggtgacagtgcctacgtggggatgagtgacggaaatccagagctcctgtcaaccagccagacctataacagccagggcgagagtaacgaagactatgagattcctcctataacgcctcccaatctccctgagccatccctcctgcacctgggggatcacgaagccggctaccactcgctgtgtcacggccttgc

SEQ ID NO: 3082 - protein, 143 aa, Mus musculus
PSGGLSLPYRLSAQPLAAGMLSGCCSSRASGRSLGLRGWASLQVHPQALRERLRPGALCSSPWSGRRGPRRPGRPGAEFDGDSAYVGMSDGNPELLSTSQTYNSQGESNEDYEIPPITPPNLPEPSLLHLGDHEAGYHSLCHZ

SEQ ID NO: 3083 - DNA, 434 bp, Mus musculus
ccgccgccgccgcgcccgtcatggacgtccgcctgtatccctcggcgcccgcggtaggtgccgcccggggccgagccggccggcatggcacacctggactactaccactgcggcaagtttgatggtgacagtgcctacgtggggatgagtgacggaaatccagagctcctgtcaaccagccagacctataacagccagggcgagagtaacgaagactatgagattcctcctataacgcctcccaatctccctgagccatccctcctgcacctgggggatcacgaagccggctaccactcgctgtgtcacggccttgcgcccaacggtctgctccctgcctactcgtaccaagcaatggatctccctgccatcatggtgtccaacatgctggcccaggacggccatctgctgtcaggccagctgcccacggtgag

SEQ ID NO: 3084 - protein, 126 aa, Mus musculus
  VARIANT 126: Xaa = Any Amino Acid
VPPGAEPAGMAHLDYYHCGKFDGDSAYVGMSDGNPELLSTSQTYNSQGESNEDYEIPPITPPNLPEPSLLHLGDHEAGYHSLCHGLAPNGLLPAYSYQAMDLPAIMVSNMLAQDGHLLSGQLPTVX

SEQ ID NO: 3085 - DNA, 175933 bp, Homo sapiens
  misc_feature (1)...(175933): n = A, C, G, or T/U
ctctgtgtttaccaaatactactggatgattcgctgcatgccaggctgagagctgggccggggcatgcaaacagatgtcaggttcctgctgtccaaggtggacggtagggtgcggtctcatgtaaatgtgatctccatccaacgctacattgcctttagttgaggtcaagggagtcgcccctcagaggaagaaatcgatgtggcatgagcagaggtgagcagggaatagtggaacttggatttgctgccaacccagtgttgaccctttgttgctattcgctggatgggatgagggagaccctgagggaaggaaggaagacaaggaggaagggctacctctacattcttctatagtggaaatcatggtaaatagcatgacgcagacacaaatgtttacccaactgccaccataacacacgaggtattttccctccacattttatgatgacagtttaataaacaatgtggaaaggctatgacagcaaacacctgtgtatccaccacctggattccaccattactttcctctcctgcttttatcacatacttactatccatctatctgtttctctatccattcatcaagctgccttcttttgggagtgcatttccagttgcagacatcctttcacttcccctaaactacatcagcatgtgtaccatcaattagagtctaatacttgtttacaatttttaaaatgtgaaatttacatacaatgcaatgtacaaaccttaaatgtacattttctgagttttgaggaatgtgactgcctgtgtaacctaagccttcatcgagatataggatattagggttacttcagaaagtttcctcatgttcctgccggtcaattcccccacttaccaaccattagagcaaaaataacgttcttgtgttgctttctagtcttcatggccattcattcttctgtttacttaatcaattcattctttagtcacccagggcctgtgtctcatgtgtctcaggcactggacacatgtcccgataggagatggtgtgtaaatgtaaatgctctgggtttgaatctcaggcctagtgttttgtagggcaagccatctaacctctttgagctccactttcctgacctgtaaactggggatggtaacattagcaacaacctcacagtgggtagattatgtgagatgatacatgccaaccacttagtacatagtaagtgctcagtaaacatattgtcttgagggaggccacagctgaatggttgttgtcagccctccaggactttaaaagcctttatttttctcatggccattaactcgactactgtctctgtctaattttggctattaaaagccctgcttctctgaacgtttttgggcaaggatatttaggcttctacagaacgatcatccaaagcccagtagagacttggaagggagtgaccagagggtagtacatcttttatttttatgttattgtcttcatgcaccccttaaagtgggcttgcttatgaagccaccagcggttggggaatggttgttaccataaggggctttgccaaaggtcttcttcaaggtgagaagtagcagctgactctatctttattctccttcgtccacccctgtgctatagcagatgatagaaaatacagcagcagaggggcatgtaggaccaaagtggagtattgtcatccttagaagggggaaacattagtagacattctcttgtgaaaatgaaggagccagggtccgggcaggtcacccttgctcagagctgagccacttgaagatgagtccaaaagcaaggataagaaacagccatctgtttcacttgcctaactcttagccatcctacagtgcccagctcagcatcacccccctcaggaagtactcctctgtgttcccaatccactttgtacttaactctattatgtttatcatactatacttcattgaccacttacctgtctgtctccccaattcagctatgagcacaaatcatgtcgcaatcatagtttgagtctctagtccctggcatgtgctaaaaaatatttttcttatattaatttaaccaatattgccaaatgttttctaagtactaggtgctttatgtgtattatctttgtttgtttgcaaaaatgttaatttttcttcccagttactataaaaaatttggagaatatagaaaatagaaatatagaataaaaatgtagtttaatgacagacaaactttaagtatgattgattaagaaaataagagaaagagcatatgtaacagatacaagagcatttcaaaaatcataatactaaagacacgtttaacccaatacatttgaaaagctaagtgaaatgaacaatgttgtagaaaagcataccaacatttactaagaaaaaatgatatgatcatccaattataatttaagaagttgaatcggttattaaaattcttctttcccattcattaggctaaaccagtataaccttgacacataaagcttggcaacaatagcacagaattttagaccaattttggttattaacatagatgcaaaaaaaaaccctaagtgaaataacttcaaatggagtttagcagtgtattagaaaataaaatatggctggaggtagtggctcatggctgtaataccagtcacatgggaggctgaggcagaaggatcacttgagcccaggagttcgaggctgcagtgagctatgatcacaccactggactccagcctgggtgacagagtgagaccatgtttgtaataataataataaaattagaagcaaatagaagtcccaacaattacccaaggtattcaaggatggttcaatataaataatatctatatatataatacatataaataataggttagatgataaaacccagatggttatttcaatagatgccaaaaaaaaaaaaaaccacattgtaaactacaattaattcatgccagaaaaaaatatcttagcagactaggaataaaaagaaactttattaattgataaaatgtattaccaaaagctacagtaagtatcttacttaatggcttaatggtgaaatataagaagtaggttcactgaagtaaggaacatgacaagaatgcctggtatcaccacttctatttaacattgattctagaggtgctggacaatgcaataagaaaagacaaagaaagaagtggtaagaagattgaaaaggaagaacagaatcaatcccccttccagacaacatgaccatctacacagaaagtcaaagggaatctatagaaaaacagagcaaataagagagtttaaaaatttttcttgaatacaatatcaactttgaaaactttaatagtttcctatctatctgaattaaaacaacttttaataaaaaatttaattctccccaagttaattgaacaattaaatgtaatttcaagtaaaatactaatagggttttctttttaccttaacctgaaatttgtatgacagatcagaaagatgcagtgaggtgtagtagttatgagtgtgaatttggaagccaaactggctagttgcacatcctggctacagcttgttctaatggcaggtaagttacttggcctctctgtgcctcagtttcctcaagtataagatagggactacctacctcatgggattgttggctaagggagttgagcagagtccaggacttgcattcagagtctttgacctctcatctggtattcttatatgcaagggccagagtaagtcactttgtgccaaagtctgtcacacacgtgttggtccattagatcttttgtccagcagacactttgagtgcaaattgtgggcttctttggctcattgtcagaaataatggacaggttggcatgctgttggccagagggcaccatggcaagggctctaggaatgcccactgctgcctcagacaacagctacccaccaacaaagttcctggaggagatgtgtatagcttgtacctgcctctctttgcttaagggctttctctggttgccacagccctgtggtgcctctcaggctgaactgccaggaatgaatgccccagacaggaggctttaaccaagagtgttaagagagtgggtgggtaaaaccccaattccttgttctttaaggggataactccaagtatgcgctctacgctgtttccagaattccccagtggagttaggctccagttgcccacagtagtaatttgttagataatatgccctttcttgactgtcttcctttcttgtctcactttcccacaccactatctgtgtgtcccggaactgcgctcccgtaaactacttgcaccagaatctgtgtctcaggatctgcttttgacctcaactaagataagttgagcttttgaagtgaggttttccctgtggacttccattttctgcacctcaatccagcttaacatatcccaccacaggcatgctggctactgggaaggaggggacagagatagatggtagacagggcctcactggagggctgaattgtgacttccctcactggcaaacatggcccatctgtgagctggaatctgaacaattaaattcttcacgtgtgtgtgtgtgtgtgtgtgtgtgtgtaggaaggtgtgtgtgtgtgtgtgtgtgtgtatgtatgtaggaaggtcttctccccagaggtgggcaggaagcatccaggctttgttagcccctgtgctagtcactggtggcactgagatgagcgagctattgtcctcgccttggagaaactcactgggcaaatgtgatgttgcagttctttgagattcacactagtagtcctgtgtgcagatggttattggagcagcaaattggagcactaagttggagtcttggagaagtcttaaccaaataaatgttacttgaattaggtcttaaaaaatgagtcgacatttgttaggatttttatggctcggagaataggattaaatattttctcaggcccttaaaacttccacctggaagtgacacacaccgattctgttcatgttccattagctaaagtgtcacatggtcacaccgaaattcaagtgggtgggggagtacaagtctaccacgtgcctataaggagaaagaggaagaagattcattactagatctaagtgctcccacagttgggtatttagttcctctgccatagttgttttttagggattagtccttttgatttaaagccaagacatttcctaggtaaaggagcaatagatggagtaggactcatttccctcttggatcccatgggtaagtggacacatcttgtattaaccatgtctttttttttttttttttttttttttttgagacggagtctcactctttcgcccaagctggactgcagtggcgctatcccggctcactgcaagctccgcctcttgggttcacgccattctcctgcctcagcctcccgagtagctgggactacaggcgcccaccaccacgcccggctaattttttgtatttttagtagagacggggtttcaccgtgttagccaggatggtctcgatctcctgacctcgtgatccgcccgcctcggcctcccaaagtgctgggattacaggcgtgagccaccgcgcccggcctaaccatgtcttattttctgtattctgatactttgacatctggggtcttgcagaccctggagggactgccccttctagagttagccaatacctagaaatagtcaacaactcacctgtgagcctgttagcataattttctaatgcaaaccaatacagagcctacgcctccaaccacctgtattattgggctctcacactccaactcactatctacctgctctaattactccagagccagtaccagacaactagggacagcccctatgccccagagctgctgaaattattcgaacaagccaatcctaaacctgctgacccggccttgtctgctccttcctgcggaagccacagtaaaggctcttgcccacagttctcccctctccctctgcctcctgactgacctggtgcttccccactggcccccaatggcatggtatgtcccctcctcctgacacctgggagtaccaaactgtcttttccatggcagtcatctcctggtgtgttgtccttaccatacctcaaggttaataaaacatattaaaacccatctatattctgatatctcagctatttatgatgtcagaaactgagaggtggaagatgaacaaacagatactctgggtctccagactggaccagctgggctactggctgagatctgagcttcctctctcacagatttttccttgcaatcaaagggaagagaggagaactgaagccccactaccatcttcaagacaacagatgaggctctggtgtttctttgggggaactgagtcatcagcttcctgtctgatcaactgccaacatgaagtggcaagatcaagctttggggccttgttggactttgctgctggacttctcagatacctccgtggtgctggctccctcctcagggaagaaagtggatatacgtgattggcagggttgattgttgctgctgctggcaggctccagagaagtcaaatagctgcctgtagctgacccattgcacatgcatcttcaaactctggtggtcattgttctacacctctggccagagttagtgggaccaacactgtggaaatatgggcagtaggaagtgctccaggtggaatttccagacttaggtgtagtcctggctctactattaactgtcaggatgtgcattcctcactgggtctcactcttctcatctgtaaaatggccacagcagtcttatttcctgacccagagtatttctgtgaagactgatttcttcaacctgcaacagaggtgtctgcaaaaaaaaactggatcacaaggtcaggagatcaagaccatcctggccaacatggtaaaaccctgtctctactaaaaatacaaaaattagctgggcatggtggcacacacccgtaatcccagctactcgggaggctgaggcaggagaatcgcttgaaccagggagtcggagtttgcagtgagccaagatcacaccactgcactccagcctggtgacagagtgagactctgtctcaaaaaacaaacaaacaaacaaaaacaccaaagcaaaatgaaacaaaaataaaactacagcaagcattataactaatggtgaactattgatatctttccttctgagatcaggaaatcaggaatggggcaagagtgtctgctactattacttctttccaaaattatactggtgatattagccagtgcaacaaggcaagaaaaagaaacaaaacttataagaattgaaaagaaaaaactaaaactctcatttttacagatgagatagaaatttttttttaaagccaaagaatctacagatgaattactagaattaataaatgagtttggcaatgttgctggatacaagggcattatttaaaaatctatttatactatgtttcagacctatattgctaagtaacaaatcactccaaaactttgtggcttaaaataacaataatcatttattatctctcatggtttctgtgcattttggattcaagaagggctcatctgcacagttcagcctttttcatgtgggtacagtcagatagcagatggaacaggaacagcaggagctggcagagctggggactggctaggaatccctctttacttagtatcagggtctctgcatatgatttttctgtgtgggttagtttgggcttcttcaatgcatggcagcctaagagagagttctcatatgatggcttagtgttccaaagacaaaagtcctgagagagggagccaggtagaagccctattaattttatgatctagctagcctcagaagtcacatagattcacttctgtcacattctttttgttaaaacccattcgctaagactaatcccttcccgaggggaagagtgttagactctacttcttgggaaaggtgtcaaagaatttgtggacatgttgtaaaacaacaaccctgtactgacaacaaacagaaaataaaataaagaagccattcataatagcaacaaaaaacacccggggctaaatttaataaaagatgtgcaaggtctccacgtagaaaactacaaaacattgctgagataacttttttaaaaacccaaaataaatgaagggacataccatgttcatggataagaagttttactattgaaaatgttaattttattccaattgatctaaaggttcaaagtgataccaattgaaatcccagcaagattgtgttagtgtgtttgtgtgtatatatataaataggtatgctgattccaaaatttctgtgaaagtgtaaacatcaagaatagccaatgcagtcttaaaagaacaaaatgggtaggcttatttcatgggacatttagacttataagcccacagtaatccagacattgtgataatggcacagggagagaaaaataggctaacagaacagaatagagaattcaggaacagtcttatgcacatatcgactacttgatttacgacaatgttagcattgcagaagagtatgtgtgtgtgtgtaggggggtggtggtggtggtggtgatcttttcaataaagagtgctggtcagttggatatccagatgaaaaaaatggacacaggacaatggaaatttttttctgatgaggtgtggcattgtatttctagaaacaatgactgctgaaatttatttggaagttctttcctttctgagctataatttccctctgttgttcccaagccttcagtgaatgcctgtttcccacacctatcttttgttaatgcatctttcttatggtcctagttctaggccaggaccagcaaagcccaagcagcagttgagaactaagttctaagctagctcctgagtgggcaggaagctcaagtccttttctcccaatggcatcctatatcctggtgccacacaagaatgccattctggctgacttcgcctcctggcctctcccagtcagccatacctggagcagtcagtgagcagtgagattgctaggggagattgctagtgtagacaattcttgcatgaaaagggggatgggggtgcaacagtctagcaaccagcaagtgatatcaagaactagagggttttttttttttttggttggggaggaaccccatttcacagtcacctttctgacccaccatcagagccatcccattccaatctcattttcttcctttcctcactccaagagaccgtgactgtgggcagatcctagacccctcttcagagcttcgggctctaggcattcctgcggccctcccctccctatcattaaaaggggtggggtcctgctgccttctccaagtggtttcagctctggatcctttgggggcaacggagcccacccgcctggagctccattactgatgctgcaagtttttgactcagtttccccatatgtgagtgagagtttaagcgcggcaatctccagggggggctgtcaagctgactcagatcagtgagacgaggagggggcgggcatgctaagagcatcctccggcgctggcctgcgtccccccaggtaaggcagcacccatctccaaagtggtcctgtcaccaccttcctcttccccccgcacccacgccgcggggcggggactagcgccgcctcaaatatttagggcaagggagtgtcccacttctggggaggggtgccgttcgggcttctctcctcaccgtgggtggcgaaaggcgggacggaaaagcgccgtctggacaggcgcgcccccctcagggatgcagggccgggcgggggacccggcggcggcccagcccggaggaaggacctccacgccccggcccgggcccccgggcccccggccctaggcagcgcccgaggccggaacaatagcgcgcgcgggcggggcgggggcgggggcggggcgctcctctgggcaccgcccccggcccgccccccgcgctcgcagtcccgctcgcacactggctcccacccgccgcccgcccaggcactgcccgcgggagccgccgccgccgccgccgcgcccgccatggacgtccgcctgtacccctcggcgcccgcggtgggcgcgcggcccggggccgagccggccggcctggcgcacctggactattaccacggcggcaaggtaggcgggggcgggcgggggtccccggcgggcggggccggagtcacctggcagctcgggactcaggcgctcccggggtcacacggggccgcgcacatcagccccgccgacgggcacgggcggctcacatcgatcccctcgcggccacgctcacgccctgagttgttgggatcgcgggcagaagtcatcccgacagccacccgtgcgacgacacagtggcccctcactcgcgtccccctgacagcctcgcagtcattcacaagccgtcacagtgacccacagccacacgcaggcggccaggcactgcttacacggtcccgccgtcccacgcaagtcaccctgacagtcacttatacacaacgacacgcaaccactcacccgcaaacagcctcaccgccacagacgagtcacccacagacgctccgatgccccacacaccgtgacatgcccccacccgctgtcacacccaggcacaacgggggacagtcacacaaagaagtcgcccgacagtcacactctcgcagccacaacgcctcacccaggcgcacgctgtcacacacagccacccccctggacggtgagcctcagacacagatcgtcctgacggccacacagtcacacgcggtcacacccagggacggccacacctcggtcatccacactcgcgcgtcgaggtttaacttctcagcgccgcagcacactaattgggcagtttactaattggccgtcactgcctggcggggcctcggattccgagtaggctgcggccaatcgaggcctgtgtcctcccgggagcggtgagccggcgtccctccaggctggggctgtagtgccggacaccctccctcctccatgtttccaggatctatccccccaccccagccaggtcccagctgcgctgcgccgggcgcattcccagtgatggaggcttgcgtgcctggaaccccgaacccgaggcgtcaggtcccactgccgggtctggcccagcctggatgggttgggtgcctctaagcagtccgcgtccccttcggtcgccggagagggaactttcaaacttagttaggaagccagactgtccgcgcgtccgccagtcggtgcgtcggtcccgggccggctggagccaagcgcgggttttcgtcactcggagcccggattgaacagcgcgcgtgggtttcccgcagccctggcgcagacgcgtgggctccgtggcgatgcggggtgagtgcgcgtccagtggctggatcggcgccccccagggtctctccccaacctcgcaggcttttcgtcaggcccctggtagtggggatgaggcaggagagaggcgtcccggcgcggatcccggggcctcccgggctgggcctccctgagtgcgccctcaggccccaggggagcggcttctggcaaagcctccctgcagttcgccaggggcagcaagcatccaggccactagggcctgcgcgatgtggggcggtggtgggcgacaagtgaggtctcgcgaagagtggcggtggttctcttttgtccagtgacctgcaaagttagaagccgatgaggggggatggtagcctcaggagaaggccgggagctgcctccagtctgatggaggaaaatagattaaaagtagcaagtggagttttcagggaggagaaggttgggtgtgggggcagctggtctgtcttctgcccttggctttgttatttttcaaaatgtgaagttggcgaggtaggtaccagcctctggtttgcgggtgtgggtgggctgggcatttgtgcctcaaagtctgagtgggtgggggtttagcctggagcgctccgtttgagggtggtgtttctataaatctcgccagggtggggctgtcccaaataggggcctttggaggcaggactcagccgaggcccctgctttattctgatgctctgtaaacctctgactcagcaccagaacctgtgcgaatctcgccgggaagggcccgtcagggagggaatgagaagccggcgattctggtttctttctgtgtgggatgtaggacccctggcccatagctgaggatgtgtccagagtggggcggggcagggatgggggtggggatgcagctgagccacttgataggtgaaaggaaggtctgactttgcacttggatgtgaaacctgctactcagtccttcaggctagagcagggtgaggcgggaggggagaggtcactgtactcatttaggggctagaggtcttttggtaagggattcccaagtgggcatggccttagtggtggtggttggggggtagggccaggctgtgatcaggaactccccttttctggttcaagaagtggatggggaggggttggggagggaaatgcccaagctccacctttacactagtcactatcaaagctggaggggaaacaggctcagggtgcagtagtgaccacacttggggcctgtaggcctggctgaatccagacattgtggggtggacacacccacacatggggggctctgtccgcagacaagaggctcgttgcacagggagccaggctttatatacataagggcaagcatttgcccaagtgatgcccgacacctatggggcagttgacctggaagggctcttggcgaccgtccccttggcgaccatccccttggcgactgtccccttagcgatcctctacacagagattcccagcctctttaaaccaaagtcacgaacattggttgttcttttggtatcttttgtttgagaaaatgcacactaatgaaaagctgttatggttttatttttgctttgaaatagatgtgtattttattaaacacaatattagcatgcattagaaaaatagcttaacaggtatgaagaagactcattactatttaatgtaataaaggtgctttttgagcatagggatttgtggccccatggctcccaggatctgtggctccatgctgggaaccattggtctcctccttctttgcattacagaaggggaaactgagtcacagaggagtgtaactcacagattacacagcaagtaaggaacaaagatgaggcctgagcccaggtttgactcccagcaggacacttgtttggcttttttgcaagtctctgtcatggttcaggggtttagagcctgtaacatctttcttagggtaactatgaactcctggttcagattttggcaaggcatcttaccaggctgggggacagctgggggatccctgctcaactatggcagactagtgtaaactagccatcagaactgggcaagcctgggttcaaatgtccatttgttgcttagtgacctagggcaaatgatttttagctcattttttactgagatgtgatttacatacaataacatgaagattttaagtgtacagttccatgagttttgataaatattaacactcatgtaaccagcatcccagtccagatagagaacatttccgtcatcccaggaagttccctcacatccctttatagacagcacgccttatccccacctccagaggcaactacttacctgatttctgttaccaatgctttctttaagttcaatttaggtatattaaccatgcttaagttctagaacttgatatgcagcataaacatttgtgtgtctgtcttctttttgctcaatgtaatgtcttcaacattcatccacgatgttgtatatatccatagtttgttccatttaattgctgagtaatattatattgtataaatataatacaattggtttatccattcacctgcaggtggacatttgggtttgtttccaagttggagctattataagtaaagctactgtgaacattcttatacaagtctttttgtgggcggggaaaatcatttaatatctctgagtcttggtgttctctcaaagacaacattgcctacctctgagtttcaggacggttaagtgaggtgatacaggttaggacagttattggcacataccagctactaattagataacaacaatatcaaccatctggggcccattccaggaagaggcttagcatctccgttccagcatccttcgtccctggactgaagggatgaaggccttcatcaaggccaacctgggtaccaccttccccatgtggtgcttcacagccagcaaacttctctttctttccaggcttccccaagaactgatactgcataggatgtggcatgttctgccatccatcattctaccaaaaatatttattgagcacttcttggtgctaggcactgtgcacagcaactgatgctgcagcagtgaacaaaagtcactcaaatcactgccctctggagcttatttatcagtgtgggaagtcataaatatatgggtgaaatatatggtatcatgattgatgggaatatgacttttggagaaaaatggaacaggaaagagagttgggagtcccaaggcctggggctggtttgtgattgttaaatagggaagttgaggaaggccttgtggtctagaatagtgtttctcaaatctatgtacacatgaagaatcagctggcaagattttttttaaattttattttaagttccaggatacatgtgcaggatgtgtatatttgttacataggtaaacgtctgccatggtggtttgctacacctatcaacccatcacctaggagttaagccccgcatgcattagctatttatcctgatgctctcactccctccctccccctggcacttgacaggccccggtgtgtgttgttcccctccctgtgtccatgtgttctcattgttcagctcccacttataagtgagaacatgcggtgtttggttttctgttcctatgttaatttgctgaggataatggcttccagctccatccatgccactgcaaaggacatgatcttgttcctttttatggctgcatagtattccatggtgtatgtgtaccacattctctttatccaggttaacactgatgggcatttgggttgattccgtgtcttttgtctggcgagattttaaaaacagattcttgggctccacccccagagattggattcggttggtctggcatggggtcctaggaatttgcatgtctaatgagctacccaggtgttgttactgctgatccaaggaccacactttgtgtagcagttgtttggttgtttgtgtacaggcttttgtgggctcctggcaggcaggaattctgcccagcacctggcatcgtgcctgactcataattgctcagtaaatatgtgctggtgggtgaaggattcaacttcccacccacacagctctgggcacagcatcttgtaaggatgagatctggacaagcttggttaatgaatgattgaggactctttttgacaaaaattcatgaagtggggttaaactatggacttgatctggacttgacctatgtgaggcctgcccggcatacttggtgggtgagattcccacagctcctttcttcaggggcacaggtggctgctaatgggtcccatggaaggtaccctgggatgggtgggcttagagctgagatggctggtcccagggaacgctagatggatgtctgcatctctgctaggaagctctcatttactttccatctaaacatgctccctatagctcctcccccaacctgtgctggaggctcctccaggaaggaccccaggatgtttgcatggcaggaccagcagcccaagcctggcactgctgcccccgatctgctgggtgaccttgagcctgtcagcacccttctttgggcctctgtttccctgtgtgcaaagggaaggcaaaccggtgaccatcagcctagagggatggtgtgggggtggaaatataatgaaataaaggctgggaatgtcatttctaactgtggagggtgcactgggagggaatgctggtgggaatggtgctttttgaggagatgggcctgctatccttcagaggacaggaaccactgtgtctgcctttacttttgtattcccagcgctagcctgacacatagatgctcagcaaatatttgctgaatgaatgaatgaatctagggcttggcagttgtaacctgtggcttgaggaacttagcatctgtttggctgttgtcatctgaagactttgtggggcacaaggagccagggcaggaccccgcagaggcacagagtctttggcggaccttccattcctagaggagcttccccaagtgggctcggaggacagagcctggcacacagagcagcctgtaggcgggaagaggagctgagcctgcatgaaggacaaggtcctgtgcctcccccttggtccagcagtccccctgctgtgtggctccttgccccatgtgattctgtagggcaatctattttgcttctctgatttcctagagttggtctcaggatatgaaggcatcatggattctggaacctggcagacttgggtttgaacactgccttcaccaccatcagggcaggcaagttatttaacctccctggactcagtctcctcatctgtaaaatggggacattgacatctcccctttggagcttgagggttggagaccatgtatgtgtagcacttggccccagcaggaaatgctttcattttcatccacaaagagcagcccaactgaaagttaaaatgcgagaggaacttgcttttctgtaccagctgctggaggatgctccacagctgccccgccatgttcttcttcttcttctttttttttttctagagacacagtcttgctctcttgcccaggatggagtgcagtggtacaatcatagctcagtgtagcctcaaactcctgggctcaaatgatccttctgctttggcctctcgaagcgctgggactgcaggcatgagccaccacttctggccctgggctgctggcagtcccaacgctggatgcttccatgtcttgatccctagacctgattttcctgagcctctgggttgaaggagcctcttattggagtgtccaggattatgaattgggagagagttgctcatttcctccaccttctgttaccttcttgaatctgtgcagcagagaaagtgggttttggaggcagagaaattggttcaaatcacagctgcccagtccactggcttgggcaggtgacctcatgcacatcacttagatgttcaggtctcagttttcttatctgtacaaggggacagaaatgcctgccttctattgttgctgcaaagatcagattaaagtaataggtatggaaattctgtctaatctagaatgatgtttcccagcctcggcgctattgacattttggacctaataacattgttgtgggagttgctgcatgcattgcggaatgtttagtcctatccctggcccctacctagtagatgccaagagcatcaccctgcccccagtcgtgacaacaaaaatgtctccagactttgcccctggttgagaaccagtgatgtgggaagaaagtttagcgcaggtaaactagaagatggtggtgaagcgaattgcagcaccacagcaggcaccgtgctttctggccagggcttcagtccactgtctcccttcagtaatcctgtatccacagggttgacagtcatcttatttacatggattcaaacctacaggatgatttttcagcatggtttgggagcaacagtaaaaacatatggtaagtgattattaacctaatgagttgtggtaaattgtaattttatatcttaatgaaatgatgttgtatgacacaggataatacattttgatcaatttccctgatatttaaaacttgctgccgtacagttgctaattctggtgcctgccaggatgagcaacctgattgtggtttttcaatatttaatggcctgtttactgctgggtttctcagatgttcaacaggtttttattgagtgcctattgggtgctggggattcagccctgtcctggaggctcagtaactccagaggaaagttttatttactgggtgaatggctatgtggatttgtaatcaattggcttaaaatgcagagtaataattaaatataaaattggctgagcagtgccaatgccgggagtgtgggaaggtttcacaatggcagagtcttacaggaatgccaggtgggctgcctgggggcatgtagagtggtggggggtgttccaggcagagggagcagccattgtaggggtgctttggggatactgtcagcctaaggaggggaaacctgcctgcgtgggagttgggacaccagcagagatggttatgaagagccttgcaccccagcctgtggggctttaagtagaggactgtgcctggaaccaggggtacggtgcacaagtatggaatgcatcacattgctggattctgaccatcctcaacgactgtctcttggtcttctgctgatgggaaagtctaatgacttgcatttgatttcccccagtagcccatgatagatactctgcttctcaaactttagcccaccagaatcacctggagcacagttaaaacagactgctgtgttccactcccagaagttctgactcagcaggcctggggaggagctgaaagttagcactactagcaagtcgatggtgctgatggtgccagtctgggatccacacttagagaacctctggtctagactagaacgtggcaggattgtcctgccttaactgaggacagtagagatgtattgctggcctggggcatggagccccggtgtggacatggttaggtgtccttctcaagccccttggtgggttgtggggagagtcttcttcaccatggggaaagtctcacattgggttgcctggaaaaggactctgagatggagagttgctcgtggaaggtttatgtggggaagttctctgcggtgaggtgggcggaaggggtgcacctgcaggggacacaggaggaaacgtgcttgggccggggagaagctggcctggcctgacctgtggttctgaagaacgccatcccacagggagctgtggcgctaaggtggctctttagtgttgccccagatggaggtgaggggactgcccaagcctttgatttctgcatcatctggtcatttcagcataagtgagaggcctaaaaatgaacagcaggcagttcccttgggtgaaggagttcactgcagtagagggcagtcccattgaagggcgagctgcaagcccagccgctgatattcctgaggttgggggatgagcatatggaagagggctggagagtaccactgtgaccatctcagggagatttcccaggaaatcaagggccagcatgtggatgacttttagtgatggtcactcacttgctcaaggttcttctttgtctcatgaagtgagagagatgtgtcatctgctctgcgtaggaaaggcaggatagttactttttgggtccaagggaagacaaatggtaattaatggagtttttaggggctcaaagatgctcttagatgctccagggtgggattccagagtccttgcactgagctgtcacatatcttcctgtgtgttagggaggactccagatgggtctccaaggagcttctgggccatgcttaaggaggtcacctctgggcaagagccagggctttctctttgggctggagtcctgtctagttcaacaagaggccatctgccctgcccagcctcaatgcaggtcagtgtttctggctttgcctttcaccatcactgagctcccaggaagctcagaggcaaaggaggggtcacctgtagccataacataggctgctgtggtgtggctactgttcattaactcactcccaactgcacctcatttttctaccattttcctctttatcttgagtcctgccactgttttattttttaaaaattgattttgctctttgtaagacacacagaagtattttagaagaggaaagacacaagtgaagtccctctcactctctgtccctctcccttctccacacacagccctgtgtcccggggtgtccactgaaaagggagtggagggtgtacttcccatcaaaccctttcttcagttccttacttttaatacattcgttgtttttatttctggaatcatttttttattttcccagaattctgagtttcttgattgatctcatatcatcgtggtctattcttcttttatggatatgtgactatcttgaatctctttgaagatggtaattcgatttttaaaaaagtggtcttttgtttcctgcatttaactctgttttattggtgattcttctgttcacttttaggcctctcttttatgctgatattttctacaaatgcctggtgattctcggttgacatttaaatttgtaaatgggaggggggcatctagatctgttctgtggttgtgagtttcctcaacatgggtgaaagccgtgactgcgtgggtgggcagggtggatgttgagtagaaacgctctgtgtgtggtgtgtgagtgcagactctattgcggtgtgggatgagcctacgaagtccttgggggcctctttgtccctcgggtaggccagcagttacccccagggcgctggtgcactttttccagccttgtgctcacccgcaggagggagtctcccaggcagatttctcatttcaattagagaattcttctggttggcattagcctgggggcaaaaccaacaaacagcttctcccagggctttggacgggcacaggggtcccagcgcaggcttcctctctctgggaatgttctggggttcagttaggtgttgggtgccggttccttagtgctcacaggcttcgctgtcagtctgtttctttgacttcttagtttctagcagtctcataacgtttctgatcccagccttttcctattttcttatgtgccttaagttttcctaagaactatgctgggcacatttgtccccatttttttaggtgagaagactgaggtccagatgaatcaagtaacagaagggtggcagagggggctgttaggcagagctggaatttggcccgagcttgctctgcagctgtcagggtgccagggggagctcacttcctcctgctgcaggggtggaagagtgtatcactggctccttgtcctagagtgctttttacattacagctaattaaaatgtgcttatttcgaagctgggcctgatttgcaggaatgatttagaaacttgtcggaaatgaatcgactcagtagtagtataacccagggtcaatgccacgcatatattttattgtttcatcatgctgtgttttggcttgaactgaactttatgatgtggaagatggaccctgggccctttatgtctcatttattctgcaaatatttcctgtttacattatttaggaaggtctcccacccccactcccatgctttctctgttctctatgtccacctgagatggaagttcatttttatgcaaatccagatgttggatccaaatgtgactttgagtttgatggaagtgcctgggttcgtatcctgacacttataagctgtatgactttggacctgtcacttagcctctctgagtcgtggtttcctcacataatcacaattgcatctcaggttggtggttaggtctgtgggagagcaagtaagtcttcccctccctcatttcttcctccaggcactgtttaggtgaaccgagccctctgtagaacagcgagcatagaccctatactaggttttagtgcctttatacactgtacagtctaaggagcttttcagttcaggatcggtgtagcgcttgttcccattggggctgtctcttttctctcctgtatcagttcccttctttctcattgcaattcccacagggagtttttaaggaccaatgaaacattcagactcacaagatgaacacaggggacacttggcaccagtctcctcgaaagatttgggacacagcctgacacagcctgccagcaaggcacgtgagctgttctcttctgcacaagtaattcttgcaacagtctccgcagtggtccacgaaggtggccaggagctattctctttgctgccccctccctcccaggatctagttcaagtgcaaaggaatgagatacacaatgggtggctgtggaagccaccctggcttagaagccttattgtcccagctgccatatccattgtaacaattccgtaggcttagcttcaaggacccagggacatgtcaggtacaaatttctctgcatctaggaaaacccaaattatggcttctttttcagatatttataacttatttatagttcctcccagttcaaatgcaacttaccaatcaggggtcatttttaccataagcagagttgcctggtaacatagttaacgtcccactttcctcaggtttccaggggagttatgctccgcaattaacaaaggtgaaattctcttgcaacaaggaaaagggtttggttaaccctttcccccatattcatcatcctacttttttcccctgtgggctggtatttttggcatctcttttggaaggacgaatggagtcctcagaaatatattccacactgtgtacattttctgatgatctatataacacacacacacacacacacacacacacacacacacacacacacacacacacatcatgagatatgctttggagtcatactggcctgggatcaaatcttggctcttggctttgccacctatgaagagttaatttccttccttccttccttccttccttccttccttcctccttccttccttcctccccttcccttcccttccccttccttccttcctttcttccttccttcccttccccttccttcctttcttccttccttccttctttccttccatccttccttccttccctccttccttccctccttccttccctctttccctccctccctccctctatccctccttcatacagccatccaaggagcatgcactgcctgctgtatgcaaggctttgtggtaggtgccaggcaggaacaggtaattaagacatggtccttttccttgagaagcatgatcttattagagagacagaaataaacaatttcaaatgtgtgtggtaagcattatgttgaagtagcacaggggagtgtgggaccaccaggctaggctggggacagtcagaaaaggcttctcagaggaagggacacttgcctgtgcttgaaggtgagtagaacttggccaagtgaagaaggtagggaaaagcattccaggtagaaggaacaacatatgcaaaggcatagaaggtgctgagagtgtcaagatgtgaggctgaagaagggagccaggggcatttggaaagctgtttattatctctgacttcagttttctcgtatacaaaatgtgatgagcaatgcttacttgtttatgaaattaaatgaggtaatgatgtatgtttaagcacctggtgtagttagcttcaattccctttccaaatctgtctacagatgcctaagagccaggctttgattttaaatgagagaaggaataaaaagcactgaagggcctggccgcccacttgcacagtgcaggtttcctgcagctgctcttgtgttggtcgctttattgctgctttggacggagcactaaatgtctgcatgccgacctggattacgtccttcaggatcagcgaagcacatcattgtgttttcttaatggctcaatgctaacagcaagtcacggcctgtcgaggtgtcctgtgggacaatttttcatctgcctatggccatgcttctgtctgacgctctgtcaacacgccctgtcattcgcttctttgtcttgctttgccttccacatgccagctggggaaacttcgctttccatggagtttggagacatttactatccagtgaccaaaggtcaggatgagctgaggagccatggtggccaccatcaatgtctttatgatgcgtaaattggatcctgtctcttctccatacaaagctactcagtggggccgggcgtggtggctcacgcctgtaatcccagcactttgggaggcagaggcgggtggatcattcgaggtcaggagttcaagaccagcctggccaacatggtgaaaccctgtctctactaaaaatatgaaaaaaaaaaaaaaaaaacaacaacaaaaaaactgggcatggtggctcgtgcctgtaatctcaactacttgggaggctgaggcagaagaatcacttgaaccctggaggcagaggttgcagtgagctgagatcattccactgcactccaatctggcgacagagtgagaccctgtctcaaaaacaaacaaacaaacaaacaaacaaaaacagggaaaaaaacccccacaaagctgctcaatggctttctgttgtagcttgatgaactcttacaaacctaaatcacatcttcttaggtttctgcttaaagccttccagtgctttgccctggtgagtagataacatccaactcctttggcccataagtcctcacgtgagcttgcctctgcctgcatttccagcctctgttccaggaaccaggcttcatgctggggacatggtgatgagcaaagtcagagtcagtccccctcagtgactccattccagtcacctggccttcttgctatttctcagatccccccaccctgttcttttgcgcttgaggggctttgcacatgctgttccctttgcctggaatgttcttgccctcattctttacatggctggctcctgcccagcctctgacctcagcttcatcctcgtcttcccagagtctgacctgctcatctgtgcagttgtctttctttttgtctaccatagcctctgagtatttttattttttaattttttatttgtttctttatttttttgagatggagtctcgctctgttgcccaggttggagtgcagtggtgcgatctcagctcactgcaaccttcacctcccaggttcaagtgattctcctacctcagcctcccgagtagctgggattacaggaacacaccaccatgcccggctactttttgtatttttagtagagacggggtttcaccatgttggccaggatggtctcaatctcctgacatcatgatccacccgcctcggcctcccgaagcgctgggattacagacgtgagccaatgcgcccagctgcttctgagtatttttcttcgtggcatcatatatctgtgaaattacttggttgctcccccttcaggataataaactttaagaagcaataggctcatgcttattttgtttaccattgcatccccatggtgtctgacctatagtaggtgctcagtaaaaagttgttgaaagattgaatgaatgaatgaggcaggttatatttttcagagatgaccaccgtaacatagcccaggctgtgtttctaagaataatccactcaccctctctgggcctcacttaccctgtttatatgttgttgccaggaggattaaacacatatatgtgagggacacagtgtttggggcctgcaagtgttaatccatgtgaattctataattctccttgtagaaacatgccaggcccatctctagctgagtccaaggaggaaagttgagatatgactcaagagggatgatgtttgaaatccttgtcctcatggcttttaatcaatgcttgaccctttggggcaaggctggcagatgcagcccctgttttgtccccttcccatctccctgggaatgatgaccttgcctttgtcaggagggaggcgtcactcccagttgcttgggctggggtatctggggcacagttggcctggccttcggagataataaaatctctctccagcccatgggaatgtttctgttgagcaagcaggactttttggtggcttctctcctgaagttatcactcttcttttttaaaaaaattaaactgtaaattatgaacactatgttacctgccaaaaagtttaggaaatgagggaaatcacctgctatgatcccacggtgcagattcaagggcagtgtttgacactttgccttcttaatactcaaggcttgcaaactgcactgccctaccatggttttctggaagccccttacccatcgctttctttctacctattcctgatgtttattgtttatgtccttctctcctccctcctctatccccttcactagaatgtcggctttggaagtgtggggaatctctgtcgtttgctcatgggtggagccttcagagcgactctgactgccaggcctctggttttagtgtttcccacccaccaggcaaactcctacacatacatcttttatgttttttttctttaaaagacagaggcttgctctattgcccaggctggagtgtagtggtacaaacatggcttactgcagcctcgacctcctgggctcaagcgatcctcctgcctcagcctcctgagtagctgcgacttcaggcacaggccaccacacctgataatttttaaattttttgacaaggggtctcaccatgttgcccaggctggtctccaactcctgggctcaagcgatcctcccacctcggcctcccaagtagctgggactacaggcatgtgccaccacgcctcgctaaacatacacgtctgttaaatttctgctcaagcgccaccccctcctggaggctttcactgctatcctcccctgtgctcctgcccttcccatctggcatctctgacactgtgggctccctggggctgggctgcccaatgtccataggagacatgggcttcagaggccatgtctgggtgcttggacgttgacttaagagcagtgggagtcctggaggtgtgctgcgttttagaagaatctttgcagttgttctgtgggggaaaatactggacggggcaagagtggaggcaggagaatagttgggaggtggtgcctgtggctcaggggagaattgatgatggcttgtggccatgctatccagtaaggtagccagtagccgtgtgtggctcttttcattgaaaatacaggaaaataaaacaaaatttagttcattcacactagccatatttcgagtactcgctagccacatgtgggtattttagcccctattgggcagcgcagatacagacatttccatccctgcagaaagttctgttggtccactctggcttggactgtggtggtggagtggaaatgaagagaagtaagggcgtgggaggtaacaggagggaagatgtatgcagtttggggatgagttggatctggggtatggtggagagtggggtatcaaagaagactcaggaagtaaaatttctgggtcaaaaaagagtgagcatttttatggctcctgatttctgctgacctgtcattttccaaaagggtcatcaccactcaccagaagcatgagaaagtgcccattttatcctgccctcctggcacagcttattaccttcggaacacccttccattgtgtatatctcttgccaaatctgccttcatttagggtctagcatgtggaccctgaggtctttgtgatctcagggacttatatgtatattaatgcagatttcaataaaaagagttatgtttgccattgtggtacggtctgatgctgtttaaatgccttcggtaatatcttcaatcagacagcaaatagaaaacagggaagttagtaataaaaaatgaattaggacgattagcaaaaggtgaaccgcttccctcctcaggcgacaggcagagttgacggagctttgcagggtgcctcctgtccaaacacacgtctggattattgcagcctttggggctggccctggggtcttctctgcacataggacttggttattgcatttagttttgcaaaggtcatggacatcccctcggaggggctttgaggggctcacaccaggattgggggcccgcaccctgggttgggtgaaggcaaggggttggagaggggttgctgccccccctcgccatttctgactgagggcaggtcagcggcttcttcctctaagcagagacatcagtgggccttgcttccctccgtgcatcctccaggggcctggacaaatctcatctgcccctctttctaacaccttccccggggttgcttttggggaacatttcctggctgtctggtggcaggggcaaagtcccttcaagaaggaagtagaggcaaaggctataattgactaacgcagaccctggggcaccaaagagaaacagaattctagtgaccaagtaagttcactagagtttagagctcaacagaagggtgagaagcttctacctgggtaaagttgggcatcacactcacctggagcaaaggggaccacgttgacccccacaggtggtgaatgtctccgttacctagctcatttctgtagctgcaataccatcaggatttcaacatgtgaactttggggggaccacagcattcagaccatagcagataacatgcacattagcaatacgattgccatgacagagtggttggtgtggttaatacccaggttagttggctgatccccacagagggctggtgactgcctacctcaggccagcgcagctgaaactgaagagcacctgaatcacatgagggtcttgtgagaacgcagattctgattcagtaggtctggggcgggtccagagatctggcatttctaacaagggctagatgttgctgctcagggggccatgctttgagaatcaaggcgcttgtgttaggctgagattctagaagcagagcctgagacgagggttcttgtgcgagaggtttggtggggagtgattgcaggagaaagggggaaggccctggagcagggatgttacgagaaagcgggtcccacctggaggctggggtgttgcctctgcagcccacatgtcagttagtcattggccatgggctgcccaggacagggagaggtatcatgcctcctgtgccacctcccagcaggtatttctccagagggagcagctgtgggcagctgtgggcatcagcactcagcccccggggtgtgggtgcacagcctgaaagaggggttctgggtggaactcgtggtcatccagtcacagtatctttgcctgaggatggccttgaggagggtggactgggaggcaggactcgggctccgatgtggactctgctgtgtcccctggggtggccgcctctcctttctgggagctgcgtgtgctgcaggttcacaaggtgatggtttggttggtcctttgttctggtcctcaggctgtgatggaaggtgagggtggggatggggggagggtctgcacaggaagaggcagctcttatttcagagcccaaggtaaggagagagagagagagagagagagagagagagagagagagacctgccctcagtcagaaatggcagaaattaccactgaggcctgcagtgttcagggaggacttcctggcagagggaaactttaggtgggacctccaagaagcataggaggagaacatagaggaatggggaaaggcagaggcatttatttagcatccatcacaggatgggtatttcacttacgttatttatttaatcttcacaacaatcctatgtagaaagccacctccaccgtgcaggtgaggagctgaggcttgagaggtgagggcactgggccggggtcacagtgggattggaacccaagcctgcttgccaggaacatactttctcttcctaagggaccataccacatagggagggggtgtgtggaaaggggaggggagctggaggccttgggaattactgcagacctgactggatgggcagaggctcgtgtagagggggctgggaggacactgactaccaggctctggggtttggattctgtatggggagccatggagggctttggggcaggcgtgatggtgcagtgtcatgccctctgtcctgggaccctcttcccatcccaactctgagccagcttctccacattgtccaccctccctggattcagacttcatctgtgtgtgtgtttgtgtgtgtgtgtgtgtgtgtgtgtgtatgtgggggtgtgtgttggggtgggtggagtccatcctggaccctttctgtagaccattttttggacatttgggctactccagacaggggtcatctatttttgctgtaagtgttttgtggggcagaggccaggctaagctgccgacagcatccctggaatcatgctctgtccaggaatcttagtgacagctgggtgtctggccactgtggtgagccttccttctctacccttcccatgcagccagccccattctgtgcactggtgccttgggggtgaatggaggaaggagcacaaatcattatcccagatgaagacagattgggcttggggtgcgtcaggaccttgtggggaggattcggttctgaattattttcagtcttctttgctctgtccccacctctgtggcctgagttttctctcccagtcaaagctgggaacatccaactctttctccgccatcttccctgtaagcctctcctgcgtaggatgttatataagctatagtcacagcttggaacctggcacgatatgctgatatcaaacatggaaactgttagtgctaagctgctatgtggggataagatggtcgaatgaaaggtaccagtggagttggggcggggacgaggaggaactactgttcagtgaatacctactatgtgccaagcactgtgctaggtgtcttttgtgtactatcttatttaacccctacaacagccctgcaaattatgtattactattaaccatgtcacaaatgggatacctgaagctcagagaaacttgcccaaggtcacacagcctgtaagaagcagagtggatctgccgggtggggtggctcatgcttgtaatcccagcgctttgggaggccgaggtgggtggatcacctgaggtcaggagttcgagaccagcctggacaacatggtgaaaccctgtctctcctgaaaatacaaaaatttagctgggtgtggtggtgcatgcctgtaatcctagctactcaggaggctgaggcaggagaatcgcttgaacccaggaggaggaggttgcagtgagccaagatcatgccattgcactccagcctgggcaacaagagtgaaactccatcccaaaaaaaaaaaaaaaaaaaaaaagaagcagagtggatcgtgaacctgaatccgtctagctctgaagtcatggtctttattctgcaccacatattcttgcatgcacaggggtctttagcttccttttggagaccctttcatgtgttcctcattgagactcagaccatcaacctgagaagccttggcatggcgtcttgtcattcccactggtagagacaggcagacctacccacagaggtgagtgcccaccttgtcccagctcaaggcaatgtcataggccagcaggctcaaactcagggtctgaactttcctgatcccagctgcttcccagcccccaagaggctttgttgttttcaacttgatgttgagtagaccagacacatgttctttggctgtgagtattatcagcgcaaatgctcttatattagctcctgtattggttgtgtattgcttcacagtaagccaccagaattaatggcttaaaacaataaccatttcattaagctcatgattccatgggttggctgcaaggcttcctggctaggctggttgtctctacaggctctccctccctgcatcatggtcagttggccagtggcctgggagctgggtgatctaggacagcctccctcgtgcagctggcagtttgcatgctgctggctgggggctggctggttgttggctcagctccccacatgacctcctgtcctccagcaggctagctcgggcatgtgcacctggggctcccaggctccctggtgcatcaagagagagcaaaccccagtgtcctggtgcttttcaagcctctgcttgtgtcacctttgttgttgtcccatttgtcaaatacaagcatatggccaagcccatattcaaagcataaagagagagatgatgagaggagtggcagcctcacggtgccaagggcatgcatgcaggacaggaggctatgattaggattagtggtcatctttgtaatctacacagctgcccccactcttcagacagcagacattcatcgagtccctgctgtgtgccaggcactgtggcagggaacaagacaggccttgtgctgtgggcatgtggcctctagtctagccagtgaataatcacatgatgaaacataactaaagcagaacaggtgtgatgaaggagagccacacagggccgggagaccaggcaacagagagctctggggggactgtgggaagactaggagttgctagatgatgggcacgggggaagcattccaggcagggaagagcacgcgcgaaggtcctgtggaaggaggggcctggcacacttgaccactccaagaaagtgccagtttcttttaagtgtcggcaaccttgggctgggaaaggaacttctggttcgcaaaggtcccctgagcatttccgtgcgatgcagtctcaggagggaggtggctgataaccttcccacgggcagctcctgggttttgtgggctgggagaggagacccaggagggatttgagcattgggaagggtgttgtgggcacagagttcagtttgaggaagggggaggaggaagcaaggaaggggtcagttgcagaggatttgggagggactggtgtgtgagggaagtgaggggttttggactcagtcctgctggctggtggtctttgaaccatggactgagaatgaggtgatcagatgctggggaggcccgtagggagggtgcacagaggaatgacttggggaccctccccagccacaccccaggtctccaaccctaagccagcctctacgtccatgtgcagggctgggagggccatcctgggggcgaccgcagcatcgagtccccatgcggatctgcctgcccagtcccataagcagcctttgatgtccctggagccttcaacagcttctctgaaggcagatcaggggctgtggttttggaaaaggcctagcatcactgggtgccagaatcatgatcataaatgaaccagcacagattggaaaaatgggaggagtctggagtgtgggttccagcttcttgccaatgtctccatgaaaccgtgcaagtagctgcccagtcctgagcctccgttttctcacctggaaatagggccagctcccatcctccctgggtcaagtgaagaggaagctttgagggctgttaacctcagcaccttcagtctaatgcttgtggacaatgcgggcaccccagtgactgcacggtggagtgaagcaaactctcctcttaccaggacccatgtcagtggaactttcttccccagaataaatagaaaccatggcaaccgggatatgtcatgtggactggcagcctgtcccagtgatggccaggagaagggcctggcacagatgcgggccccactcacaactccacccgctgtgggatgacccaccgggaccccttagtcctcccctcctgcctgaggtaggactgagaagttcagtcctgaccttgggtttccattcaacctcagattttattattacttaatagtaaaatgcttgtcccggaaagcacgtctcaaatgagataagttgaagcaatcctggctcctgccccatgtcctgatgggtgcactaggagttatcaggatactgctggatgtgggcactgaaatggcagcaaatctactctgagagggagggcgctgagcctgtgagcgccttcagtcttcagatggccagcgaggtggtggcattaatatcccactttacggagagcctcagctctttacccgggattcacagctagtatttgacagagctggcattcgaacctgcatcttcatgccccaggacttatttccacactggctttagctgaactggaggcccagccaccacatggcaggcaaagagcatttgtcgctccctgcattgagggggtgactggtctgtgacgcctgcccccagcacaatgggtccaggggtggtagaggggcatctgaggcagctttgaaggccagggggtttttccagcccttgtgtttctgccttatggcctccttgtgcagctctggcaggagtggacaggtgccctcgcttctagaagcatggtcttgccttagctggaagttgagggtggagcttcctggagtcgctggcttcacctgcctctgcagccatccagacaggatgccaaagccccagcttgggtaacccccttgtctcttggagccccagtgtccttatctgtaaaacgaggagatcagtgactcagggacagcatagcatagtggtgctgtgcatgcacgttaggtcctaggaccttagttccaattctgtctgtgacaattactagctgtgcacatctagtaagttacttaacctctctatgcctcagtttcctcctctgtgaaatggggataataattgcatctacttaatttgtggtaaggtttgcatagggatttcatcatattgggactggaggagttgagtaagaagaaagggcaaaaccttggtctagcttccgccaatttctgggcaaaagctgaagttagcacaaagtcagcccaagcatgctccactgcactcaaagtacagttctgctgccagaacccagccagggggaggggatgggaactgtataagagtaggacggatgccaagactagtgaggcattttaacaacatgaggctggaatgtggcattgtgtaagtcccacaaatgaatatgtgcggtgaggttggaagataagcgagggttcatttggtgagaccattcgtatagtcagacatgagtttaaactgaccctgcagcttagaagctgtgtggcctcaagagcttacttaactcctctgagcctgttggcacacccaaaaagaaaaacaactcatttcattttgctagattgtctaaggattaaagagatgacagaaagtaccagtgcctggcacagagtagatgcttactaagcaccccaagagtgtcttatggggtgcttatgtgattcagtcggtgctgctgctgagtgaccacagggatatgctcagatatgctgcagaggtttccttctgtagttaaagggcagggagtcatgccctgtatgagacatttttccttagggaaaatgaagtcatgggacttgttcatctggatagtgcagtccaggggtgtatggggcttggggtactgcaggcaagtccctgggacagtgtggctgagggatggggcattgggtctaggagcttggtgcagagctcaatcaggaaccttgaaagaaaacacaatgtgaagactttctaccttgaggacagtggggccgtggaaggattttaaatggtgggacgtcactttttttttttgaagagttggtgtcctactctgtcacccagactgaagtgtagtggcatgattatagttcactgcagccttgaactcctgggctcaagtgatcctcctgcataaggctcctgagtagctgggattacaggcatgcgccaccatgcacagctagctttttttttttttgtctgtttttcagagataggtctcgatatgttgcccaggctgctcttgaattcctgatctcaagcaatcctcccatctcggcctcacaaattgctgggattacaggtgtgagcaatcgcacctggcaactttttttttttcccccaggaaaactctactaattggcctggaaaataaatgggggagggtgagctaaggggctgctatggggatccaggccagaagggtgagaggctgagccagagtcgcagggatggagggagaagaggtgactgcagaggatgaggcagctatcagggcaccctaggggtgtggtgtggcactttagtggtcagtgctttgcagagacgaggcacatgggattaagcaaacacaaaatcccagtgggcatgaggatgtagaccagggcaccttagaagcgcaaagcggctttagtcacttcccttgcgtgagatttgtttaatagaagcttgcagcttcgcagcacttaacaggtgctgacgggggcatcacaatattgtgaaattaagctgtgaagccgacttcattaccagcttacctggcgatgaagcagctgccttagttagcactgatggttgggcatgacagagctaaaattgaacttggcaattactgctcatgagaggttctcagtactgtgaaaggaaggttccatggaaatcaaccctggtaatcacagggtttaaaattagtcagttactattaaggttgctctgtcagcatatgcttcagggtgatgtgagggaagggggcgtggaagcttgggtttgggctgttgtgggttaccttatgttcacctgcactgcatttaagaaaaaaagttggttctaggacaaaggttcgagagtcccagggttaatatcatggtgcagggtggccatttggataataggtggttttaaagcctttttttttttttttgagtattttttgagacagaatttcgctcttgttgcccaggctggagtacaatggcgcgatctcggctcactgcaacctccgcctcccaggatcgagtgatgctcctgcctcagcctcctgagtagctgggatgacaggcatgtgccaccacacctggctaattttcgtatttttagtagagatggagtatcaccatgttagccaggctggtctcgaactcctgacgtcatgtgatccacccacttcggcctcccaaagtgttgggattacaggcgcgagccactgtacctggcctaaagccctgttctttttatttgcgtaagctcacaccctctcagctttggtgttttctattgacttaaggaggtttcctgactcgcttctggtctctccttgggatgttgcacaggaagagctcagctctctgtgggttcctccttgccctggaggaagcaatgatgtgataggatgggaggttcctgagtccttcacagaattgtttttggtaaaccttggctggaacatctcagcaatctcagaagatttgtccccgttttgtgaataaagacagcaaggggctgatatgggcttggttgctactgtagtgaaaatcaaaggacaaagcttataatgattcaattgtgagtttgcctgggctgtgtgcactgaccctcatcaataagaagatggaagttgactccttgctgtgagcctcaacttcctcatctgtaaaaggggaacttgttttgtgcaagtgtgaggattaaatgagatcatcaaagcacagtagaacctcagcatggtggctgttggctattaacagtgatatttatggaccagaccaggcactttccatcgatgacagctgctttgacaaaaaccccaccaggagggaactattattcccatcttaacattagtaaacagaggctcagagaggatctaagtttggccaagatctaagggtacagccaggattcaaacccaggcattctggccacagagcctggccattgtccctgcccctcaccctgggaacagctgaacaacaaggaaacaagtaacatcatagctcatgcctgtcatcccagcactttgggaggccaagacgggaggattgctttaggacaggagttagagaccagcctaggcaacatagtgagaccctatttttacaaaaaaagaaaaaacacaaaaattagcagggtgtggtggcacatgcctgtagtcccagctacttgggaggctgaagcaggaggatctctcgagcccaggaattcaaggctgcagtaagttatgctcatgccactgcactgcagcctgggcaatagagggagaccctgtctcaataaataaataaataagagaaaaaagaaaagaaaaaagaaaacaagcagcttggacaagctgcctccatggataagaagagagaagcattaaaactgaaagatcatttgcaaaaggctgcagcttctccacaggaagctgagtcatctctctttgttttgaaccgtaaccatcacgttgcctcagaatctgaaaaattaaaaaagaactaaaaaaatgctgagtttcttcatggtgcagaggcccttcttgtctccacaccagaaggagctgagcagaggggccacagcgatgggaccccctccaacccacattaaatacctccacctgaatatttattgcaacggcaagagcactgcacctggaatccggtctcacagccttggatttgccttgctaagcctcagtcatccaacctgccaggcaggtgcacctgccgcagccctgccttctctgtggagctggtgctctcggggtgcacgagtcagggttgggaggatgctttctcacctgtacacctgtggatggtacgatcacaaccccaaatgcctcctcccagtacatttggcagaattcagtccagaatctgggccttggcctagctcctataaactcccctcctacagatggtggggttcagtaagagtttgatgaagaatgcaggggctttctgtgcttgtctggtatcacccagcttctgccttttaaaatgcctcattccttatctgtgtactcaaactctgccccttctccaaatctcggcttgactgacacctttttcatgaggccctcgcccaggtgaccaccctgagacccttaccggtgagtactgtcttccttatactcacctctgtgtgtaagctgggcttcctgtgaggacaggggcagtgtcctgatcacacattgctccagcttctggaattatgacctatgtgaagtagggaggaggcagagggaacaacaaaaaaaaagttttttcagtgaatgaataaataaatgagacttgaaagatttttacctttgtgttttctctctgacaatcaattatacctttcacttatctcttgtttctgatgaacaagtttaacattcaacaagcaacatggcttcttgcaacatcaacaaatgcccatcattttcaaggccgcatagtattccattctatggagagccatgatttatttatccaatcctctatcgatggactttattgtcattttcatcttcttataaataatgatgcaataaatatccttgtccacacgaatttgagcctagaaagttctttatcatcctaagcttatataaatattcatggacaatttcctcttgcatgcttacagctttgtgtgtgtgtgtgtgtttctaaatctttggtatgtctgaaattttcatccatctttgtatcgcggtgcaaaatgcacctctcttttgccttgagacgagtgtcatgtgccttggatctatgggttgtgtgcactttctatctggtgagcacgcactgtgtgtcaggccccatgctgggagccaggacccagagatgagcaagacagacgatcctgaccatcaagaagctcagagcctagagaagaacaataaacacagaaacaaaagccatcaaacacatgaacagaaacgattggctgcaggagtgtgctatggacaaagtaactcaggtgcaggtgagattagaggagctctctttggggaagaaggagatctttgagcagagctggaaggatgagaagcagtcagttgtgtgaaggtcaggggaagagcattccaggcagagggaacagcatgaaaaaggtacagaggcagggaagcaagacttttttcctttctggagccttttgtaatcccccttccagcctctccctcctcctgcagacacgctgggcaccagccccctttatcacatgacatttgctattcccaggccgttctctctgtcacttactttagtattgttacaagtgttcaggaataggatgattccccagagcgcttcctgcttagtctggatcctctcagctctgtggtgcttcctcagcagcctttgctgctactgaaatgtccaaaaaattaaaattagtttaatagcacctggcatagtacatgacacttaataggtactattatccccattttacaggtgaagaaactgaggctcagggaagttagccattccagcaggcagagctaggattcgaacccagctctgtcttatttcaaagtctgccttcttcatggagccctagtttaactgcatttgtgcgaaagctaatgagagactgctggttaatccttagtgcccggggccagctttatcccaagcccgatcaaggcttgtggtgggtgaccttggcctttggcctgatggcttcagaagagtggaaaggaaccaggggaggttcttatttttttgttttaaattacaaatgtaatacacgcttgtggtaaagaaaaaaaaaatgaaacaagaaagaaaaaagcagccactgaaaatatctcctcctccctagtgtaactgctattaacagcctggtatcttttatagtgcatgttcaaacacatacatatacaccgttattgtttttataaaaatggaaccatgtccttgactttttcttgcaggcagttccaagtcagtacctacacaccttcctcattccatcagatgtatttcagtgtattcaaccagaccctggctttcgacatttagctgtctctaattctctctgtaacaagcaacatccttgggcatgcatccatgcactgagtacaggtatttctgcaggatggatgctcagaagtctaattgctgaatgaaagggcatgcaagtttcacacgttgacaggtgctgccaatttgccttccgaaggctcttccagtgcaacacccctcccaaggcagcgtgtgtgagtggggaaggctcttaagccacaaatgacgtggagccgcgctgtacttaggggctgcctccccttctgctccccgagacctggcgtggagaccgccaccaggagctccgaacatgcaggcccaaattggaataggagatggattttgataaaagaggttaaataacaggtttttccatttcaccttatacgaacgggatggggggtgggggtgctgggcctccagccaatagaggaccaagagttgtcaggagggcttataaagcttgctatttctggcattttttcctctttctctgctgattatgcagcagactcgcacagaggctgtcgcgggcgcgttctctcgctgcctgggcttctgtggaatgagactcgggctccttctacttgcaagacactggtgcattgcaggtgtgtttccgcagaaggtaagcagcgggtgcccaccgccccatgaggtggaggtggtcaggccgtcactgtgggctgaagataggtgatgtctggatgggggcaggcagggacctggactggtgcttgtcacattctggaatgaagatgctttagaggggccaggaggcctgcagttggcagctccttcttggagaggaattctggaggcggtttgggctgtcctctggagagcagggtcaggctgtggccttggtgcccaggctgctcaggatcattcattcattcattcattcattcagcacaccctgcagtaggcctggccaggtgtgggttggggggtctggctgattcagactggaaacaatgggagcagtaatggggatggcccatggcttgggaggagcccagaagatacctgggctgaagagtgacaggggccttccaagaaggcaagacgggtgagaagcagctgaggacgtcaccaggaatacccgagctgcctcttccactagattttggagtttggggaatcaataaaaatttcttgccaaatttggtgaatgccaccttttccgtttgtgaagtaaggacattaaaaaataaccagttgggatctctacgcagcatactttcgtagaagaaaggacagcaacaaatgagaaaggaactaaggggacttaaggggacacacatgcccttaataggtggcagagatttcaaatgcagaaacctaacgtgaaggggccatcccagctgtgcctgggaggctatcttggtgatgggagttgactgggttgggggcggggcttgttgctgttgatggtgctgcacccagcagaccaggagacccgacctcttctcgtgctctgatttatcacagccattgttgaaatctggcttcgtgcatgtgtgtcccagcaaaagaaggctcccgctcaggtccgctttccgtcatttggaacatcctgggtgaactgggagagaccaggaaacaccagcttctgtgcctcctgggatggtttctaccttctccactctgggtctgaaagcctgcaggaggcagtgggcccaggtctgcaagggaagcctgaggagccagctggacacagaatgtagctattgagcacctactgtatactggggtctgggttaggcactgcttacatatctcagctcggccataaatacaatctgtgacatagggcaagttccttgagctttctgtctcttcatccataaaatggggacactgatgcctactttcttgtgttgtcatgatggtgtgtgtgtataagcatttacgtgtgttcatgtgtatatgtatgcacacatgcacgtgtgcacacactcactgtgtaacactttgcctggtgtgtggaaggacctcattaatgaggcatgaatgaatgaacaaatgacctaggatgtcggctcagctcatgaggagggcgtggctcacaacggcatgtgtttgtgtgcatctgcgtgtgtgatccagggagctctcttcttgtgcttaagagtcagaggctctggaatctgtttggggagcttgaagggagggccatgtctgtttcacagccctggctaataggaattctttgtgtttctggtcacttccatgggttcttgactgggagaggagttcatggcaaggactgactggccattttgaaagagaaccaaccgatccttttagtgttaacacttcctgaacaacttactgaataccactcatcagcactgtgttggtggggccctgggaaaacagccagccagtaagccagcattcagattgctacctgacgacctgtttgctgagagcccctggctgggaaggaaggtgctggaaggaaaggagtcttggaagggagagagtggctgagaattgcaccctcacacatgctccctgcctggagaacagaagctgagccaggtttaagaccttgttttaagtcatggctctgttccttacttgctgtgtgacctcagcacagcaacctctctcagccagagcttccttgcctataaaatgacattgttaggaggactaagtgggataaaatatgtaaagcacattgttggtgctcagtaaataacgtgttctcctggggagggaagaggccctggagagcttttgcctgaaaccagggtgtctgttggcacacaggggcccaaacacggcaggcacctgctgaatatttatgggaagaatgaaggtgtgcagaagtgggaggcctgagttgcagggcttttcctgccattagtaattgctgtgtgatcttgggccagttcttcatcccctttggacctttgattccctcagaagaagagtccaggctgatggcttcaacccctgctcttccactgtgttggaaatcgggtatgtgggagcctccagagcaggatgagcttcatgtttgaaattaatttcctttcctcggccggcggcatccctgatgactctcccctgctgccttgtgcatgaacaaaccggtaattaatgaaattgggagcaggggcagggaggtgaggtttccagtggaggcagctgggggtctgctggggcagcctctgtgccacccactgggaggccccgggcctgctggggcagcctctgtgtcgcccactgggaggcccagggctgcccaggagctgccatctccgtctagccagggggcctggcagatgttcacatatctggacagttgcaaagggaggcatgaaatatagatggggagatggggagtgaattctccagcttctcctgggcctggggagccattttccagggagggcctcgggaacctcctgctgttgggtgttgagatgagcctggagtagcaattgggtggacctggatttttagcctttggtctcttgacttctagttgtgaggcttgaggcagctcacttaacctccctgggtcttccttgctgtgaagagcaattgaggccatgggagcagcagccccctagtcatggggggattggtgtagaaaggcagctttgatttgcatgtcctcaccccaggggctcatctagaaggaaacagttactctcaatggcccttttcctgattcacaccctccgtcacctcaaaatgccccttctactttgtgcccactttttatatatgactgtccacccctcggcttaggccacaaatgtgggatcatctttgacccctttctctgccttactccttgcatctaatccaactgcacttgctgctggctgtaccttcagggtgcaatgacttctccccgcttcactattacttgtcaccgggatgaccgcaggagcctcctcccaggcctccctgcctccacccttcctccttagtctgttcttctcgcagcagccagtgggatctctgagaaccacctgatgcgcacatccctccctgcttaaagcctgtggttggttgtcttttgtaatcagctggatctgttctgatacctttaatatacccacctgggggagctgggcacctgtctgatctcactttttgcagtccacaagctagcttctgcctcctgcagaatcactgtcctgccacctcctaaatccgcttccccactgaccaagctattgtgcctcttaattttactttcagacccctttgtctggaatggttcttttaccccttggactcctgtttattctcgcaggtgtggtcacgacatccacggctttccagaagccttctctgattgcccccaccgtctagccgcaactatcagagccagggtccccttccctgtgcccgcttctgtcattgtcctccccatcagtgctgtgatgctctgggaggacatcacccacgatgatgcacctttattctcacacgtgctgcaaggccagacagcacagaaatgttaatttaggcagtagatgcaaaagacctccctgcaaattaagggccttcagacctagacagactggaataggatcctcaaactggtttgatttggctgtgaccttggacaagccacctagcctctctgctttggagggtcacgaggattgacgagatgacatgtataacaaacatcctcctctttcccacttgctggattgtaagtgttcccaaagacacttggaatgtttaacccctcacatctgctctgagcagagcaaactcaacaatgcatagacgagcccaccacagaaccccaaacaggagcaaaaatagcagccatcggggcaacctgagatgcagaagccacaggaagaagccgcaggccaagcggatgtcagcggctctgaggccctgctgaggttcctcggatgtgctgagctctgcagccctctcgcctgccctcgctggctccccaaccacagcatcagataaggccggtggaaaaagtgctggcttcctctctctggggaggggtaatctcagtgccatctgtggggcacactccatccccagttgcctctctggcctcccctccccctccccactgcttgctctgcccgtctttgctggtctctttgctgaccgaggtcacacctgctggcagctcccatcttagggcctgtacacaggctgtcaggccctggaatgctctccccaacacatctacttggctcactccctcacctccttccagtcttggctccactatcacttcctcaatgaggcccaccttgactgctctgtttaaacgtgcataccctccatctcgacattcccaatacccctcacctgctcaactctttcttctttccatataccatgtaagtcacttattgactatgtgtattgttttctatctccaatgcaagagcgtaaactccaggggtctttgttcactgctgtctcccaggatcccagaatagtgcctggcacaaagtagatgcacagcaaatacttttttggtgcacggacgcatgagtacatgagtaagaaccagcccagcaatcagaagaggttcaggctagattttggggtgaggggggtttgtttctgggctccaggccccagggatgggctcacgtagtcattaaggattctggccccatgattgacctgcattggccagaagcccctgctgaccttcagggcgatagctgtctggggccagagaagggtctggaagcctgtggtccctttcaggagggacccttgcagtagttaagagtttggctttggaaccacattgctgtgggtttgaatcccagctccaccacttcctaggtagatagccttcacgtctacctctctgtatttgagttttctacctttaaaatagagtagataggccggtgtggtggctcacgcttgtaatcccagcactttgggaggctgaggcgggtggatcacttgagtaccggagttcaagaccagcctggctaacatggtgaaaccccgtatctactaaaaatacaaaaaaattagccgggtatggtggcgcacacctgtaatcccagctactcgggaggctgaggcaggagaatcactcgaacccaggaggcggaggttgcagtgagctgagatcgtgccattgcaatccagcctgggcaacaagaatgaaactccacctcaaaacaaaacaaaagtagtgaattctgaccttgcttgggtggtgattatgagggttacatgcaatatagataaagtgcctgactcatggtagatgatcagcaaatgaccattactattaaacttattatgtttttttttttttttttttttagagaaagggtcttgctctgtcaaccaggctctagtgcagtggcatgataatagctcactgtagcatcaaactcctgggctcaagcactcctcccatcttagcctcctgattaggactacaggtacataccaccatgcctggctaattaaaaataattttttgtttgtttgtttgtttttttgaggccgagtctcgctctgtcgcccaagctggagtgcagtggtgcgatcttggctcactgcaacctccacctcctgggttcaagtgattctcctgtctcgccctcccgagtagctggaactacaggcatgtgccaccacacccggctgattttttttttttaatttttagtagagatggggtttcaccatgttagccaggatggtctcgatctcctgacctcgtgatctgcccgccttggcctcccaaagtgctggaattacaggcgtgagccactgcgcccagcagaaaagtaatttttttttctaagagacggggccttgctatgttgctcaggctggtgtcaaactcctagtctcagctatcttctcgccctggccccccaaagctctggaattacaggtgtgagccactgcccctggcctaaacttaactgagcatgttagggttatgctgccgtaacaaccccctgaatctcagttgcttatcataaggaaggcttatttttgctcttactatgtgttccatgacaatcagcagagaagtaggggttgggctctgctccacagatcactcagggctgtaggttggtcaagtctcgaccatctggaaccttgctggtcctctagagaaagcctgcagatctcaagtttgcttttttatacttctacccagaggagacccacgttgtttctgctcataacccattggtctaaactagacgcatagctccaataaatggtaaggggagcctgaggtgtagtgtcctatgtgccaggaaggagaggagagccagatattggagagcagtagtaaagtctaccacagcaggtacttccctctctgccctctccagacatataggcagactgagacacagttagtcagtacttacgggactcactgtgggtggctgaataatgacccctaagtatagctaggtcctaatctttgaaacctgtgtatgttactttaaatggcaaaaggggctctgcagatgtgattaagggtcttgggatggggagagtatcatgggttgtctgggtgggccctataggatcacagtggtccttataagtgaggaggggttgcagaatcaggagaaggtgatgtgaggatggaagcagagactggggtgacggctatgaagatggaggaagggaccacaagctaaggaacacaagcagccactagacacagggaaaggcaaggaaatggattttctcctagagcctacagaccagccagccctgatgacaccttggttttagcccagtgaggctgattttagacttcgggctttccagaactgtaagagaataatttatgttgttttaagtcacctgtttatggtgatttgtgacaacagccctaggaaactaatatatcaccttcagtcagaaaatcatttgagacccagtgcatagaagccgcctctgtctgctcagacagaactgaccccttcctcctgtctgttgtggcgccccttgtacctgtctgtcatcacgttcatgcacaggcagaggtgtctcttaacatagtccttccactcccaacccgcatgctccaacatgtatgcccacactctcagccactctttgagcctctcattgcttgggctgatccgggttggtgtgtgtccacgtctgtaggaatgcagggcaggctggtggcaaggtcagtgtaaaggacttgtctctggggaaagggccctggcatgccccaggagtggctcagttggcgggagagtagaggccctgtggaagatggtgggagggtgaaggatggggctggagaaatcagcagggaccaggtcaagcaggaccttaggaccaagagaaagaggtggatctttgttttgaggacagagaggagcctagtaggattttgagcaggggggcgactatggatgactgatgactgggttctcctggtttgcgactaggttagaagactgtctttgtcctcccatcttctggaagtcaactctatgccagacactcctgagctatgcttttcacaggatttctcatgcatccattttatagaggagaaagctgagactcaaagaatggaacctcatggaatccatcctccacgtggctagctgagtcatcttttaaactataaattaaagcatgttactcccctgcaagaactctccaagggcttcccatctgggatgaaatccaagtgccttatggtggccctaggaccccaaatcacgtccttgcctcgcccctctgcctactgtgtcctgcctgttattccccctgcatgcgagagcttctacttgtggacctcagggactttgcattgctgctccctctgccttaaatgctcccacccactacttgttgcctgacagcctccttctctctcttctgggctccctcagtttaattgctgcctctacagagagaccctgtctccacacttcctgtgtttgctgcacagcacttagcacaatgcaacgtgtgaccacctttgtgtgtttgcttgtttgttgcctgcctcctgcagtggactctgaggcctgcaggggctgggactgtgtctaccttgcttctcgttgtgtcccagcccccaggagctggtatgaagggggcactcagcgaacaaacctctgcggaaagatgaaggatgggtcctgtgtgcagagggagctctggacctttgagggtggctggaggctcctggacctgccttggaggacagacaccaggcaggggccagctgaggaggagtgccagtgatttctctgggcacctgggcagccccattcctattgcacctggccttgacccactccctgtgctgtctacattctctgtcacattaaatgctctgcctgccatttcagcctctgggaggatccacgagggtgtggggagagacgtcagacctgggtttggatcccagctcagccacttaatagctatgagaccttgcacaattccctttaactttccaagcctcagtttcttcctatgtaaaatgggcatacagagggacagccttctagcacgtgactcctggtgcttgattcgcttgaaactgccttatctacaatccaaaaagccctgcgacgagaagttgttttgtcaatatgctgcaaactcatttggcccccaaaatctgacctgagctgacgcgaggctctttgtaatctttactcaccccacttgtgtgaatattcatatgttccactgcagaaatatgaatgtgttccattgcaggtgttgcctgaggctccactgaagctatggcataatttgcagaatttgcacttcattacttttctgaaattcaaacaaattctgaaactgcacgagttctggctgagagctgtggatctgtgcatgtgagtagctgctgaaaaccctcctgggtcacaggagggcccatgggggcctctggcagccatcgcagagcctgaaacccgttgtttccccttggctggcttctggtttcttggcagccagtgtcttcttagccacctggggttatgttgggttttgctggttcaggggcaggggttaaagcttagggcagggtgagccgaggtactcagacatttctgatgtgaatttaaaaggagaatttttttttaatgaatcatcagaagaaagaaatcagaaggaagtgtgtgaccaaggagaggaaattagggtttgcaaattgcatgagtcaccccctttctgactcctgggtgatcccttgcccttggcacttttcactcatctctgagactctcaaggccgtattctgcataacatgctggggctgtcatggttttattctggctccaaacctgcttctcattctagccatcagtataaatttctagttttgaatcactgccacgctgttttacttattattgtgttagccagtgtttcttccctgcccaagccctgctcagactcccgtttccccatcttagttagcatctacaacccattctccacccagaagccagaggccagtttctgaagtgcagcccacattccgggtttcagtctcatctccccagtgtggcccttgaagctcccttgtgataaggccctgcttgcctttctgtcttatcttgcaccgccttactattccatgaatgggcccttccctccagctcccaggctttggcaaatgctgttcccactggcctctgccctcgcctggctagttgtgtgcatgctgcgggtagatctgcttagaagccacctcttccgtgaagtctttttacaaggcccttgtctaggccccacgaacctggcttcccatctacttatcacccacccatattctgattcctggtcctgtccccttccctagaccatgagctccgggacaaagactgtgtgtccaccaggtgcagtggctcaggcctgtaatcagtcctagcactttgggaggctgaggtgggtggatcacctgaggtcaggagttcgagaccagcctggccaacatgatgaaaccccatctctactaaagatacaaaaattagttgggcatggtggcgcatgcctgtaattccagctactcaggaggctgaggcaggagaatcgcttgaacccaggaggccgaggttgcagtgagctgagatcatgccactgcactccagcctgggtgagagtaaggttctatctttaaaaaaaaaaaaaaaaaaaaaagactgttttctgtatatcactttaccatccccagcactcagagtaaaaggctgttttaagcaagactgttttaagcccttgagtgctcgtcccctgcctctggctagctgtgtctgcctaagagtggccaccatattgtcttccattaggctggaacccgtttcccatgtccgcagtggtgtgaaatatcccagttgcattgcagtaagtttattttatgtgcatttccccacttgccattgaatcaggtgtcccttttttcccttccatatttgtttcttaagatatcgcctcttgtgtgacttttgtttgaatcccatgtctttttgtctgttggcatcttgctttctgtttaatgtgactgagccatttctaccttgtatatattaactgtcttatagttggtgctgatattttcttagtctgatgtccttttcattttggttttattatgttttcttccacagaagatattaatgcatatatatttgaatctgtcaatctctcttcctctgtgattgcttcgagggctgaagaagttatcctgctccacagatctgataaacattctgttctgttttctgattgtttccctgtaacatgactttttatgtttaactctttaatccattcggagtgcatgcattttggttggtgtcttgcagtgggtatctagttcactgttcctaaatagggacaggataaccctcttgtccccattctgtttattatataattagcccttgtctctttgtttgcaaaaggggagacaaaatatagtagctgttataagcgtgagctttagcagaattaagattttggctttgccactttctgtgtgagctatgagcacgttgcttaaattgggcttgttttttcctctgtaaaactggatgatatcttcctcctaggaccgttgtcaagattgagcagaagatcatgtgcaaagcacatcacatgttacctggcataaagtaaatgccctcttttttttttttttttttttggcttaaacaaatatttattttctcacagggctagaggtcagaagtatgagatcaaggtgttggcagggttgattccatctgaggcctctgtattagtttgttcttacacttctataaagacatacctgagactgggtaatttatgaagaggtttatttggctcacgattctgtgagctgtacaagcttctgcttctggggaggtctcagaaaacttacaaccgtggcagaaggtgaaagggtggcaggtacacttcacatggccagcaggagagacagagcaagtggggaagcgttacacactttcaaacaaccagatctcatgagaactcactatcacgagaacagcaagggggatatccgcccccaagatccaattacctcaccatgtccctcctccaaaattgggcattacaattcgacatgagacttgggtggggacatagagctaaatcatatcagcctctctcctaggcttgcaggtggacagcttccccttgtgtctttacgtggtcttccctctgaaatgccctccttaatcttgatacgtttccatacctagttgggtccaacattgtacttttccttctgtttcattgattttagaattcttgttttctgttactgccacactgctttaattgtggcttcacggaatgtttcactctctggccagattgggcatccttccattactctttctttaagaatattgctttaaacacgcacctgttttctttagtggatgttgattttctctctcacattctgtactgtagcctacctcagtgacttctagacaccccttcttccccttccccagcacacataccggttttcccccaacctggctgcccagcctttgctcactctggacccactacctcacaggtatgtaccaactgctctcacctggcctatctccaccttagtgctttatcacccccctccaggtgccattatgcagatacccattttccctatggacctgagcttccctgggaattggttctaggtccctagtgcccctctgcacctggcatatggccaggtacattgtaggtgctgaggtcagggcttggggaagacaggaatgttcaccgtgcccttgggcttttgacagtaactgggctaaatctggcttcttctggaggtgcaggcttacaggactcaacaatttggtggttgtaaccctggacatgctcttgccaataacggtgggccatccatcagccctggccttggtttccccagtgggatttgcagaagccagaggattaaagccctcccagccctgaggcctcattatttatcttagtgggtccacagtgaagatgaattagaataactcattggcacatgccatgccttggagtgcagttttctgttttctgggagagaaaaggcctcttaggacagagccccccactgccctcctgggtctccaggagacagcccagatctgggtcagaagggttcaatagtcaagaacagaggggtggctctctgcctgggaaggcaactggggtgaaagcggggagctggcctttctctgcatactgctaggtagcatgcaaaaccctgcctgttccattcctgttctccaggggaggaatctgaggacgagaggggtaagatccctgcccactgccatgcagcagcttagtgcagagcctggacttgaacctagatctgcctgcttccagagctgtgctgcaccagtgttctcgcagctcccagtccaaaggccgacgttgagacagcgcttaaaaatatatcagcagtgtttacaaataccatttcctgtgttatctggtactgacagaaggaagtgaacctggcactttgtctgtgttaggtttggggttagaggcataagtgccaagttcagatgacctagaaaaacctttctaggtcaaattacaatttcaaagatttcttttcttcttctttttgaaccgctccaagatcgaacgctgtcgttgacatatttcccttccgacaacacgagccttttgtggcatgattgagggcttgttttgtagtgctggggagaaaatatcttccacatcatctgctcattgtctcagtcacactcgttccccccacaccacagtgcaacccgacgtacgctcatgcggcttttagttaattgcctttggtaagaatcagttttgggacttgttcccaactgcttggatgatagataattgtcaaatacaaatattggcagcgcagggcaacctgaggctctagactgctgactgcatcccagcctctagggagagctgggagctggccagctccatgttatgggaggtaacggggcaagacctggcaggagtacagccttctcattagagtgtaggctctggagttgaacttcctgggtttgaatcttcattccaccccttcctagctgtgtggccttgggcaagctacataacctccctcgacctcagtctccttttctgtaaaatgggagcctcagtaacttaccttgtgaggttgtcgtgaggattataggaacggatgtttgtcattcaattaagagtgcctggcttgttgttagtgtgatgtaaacattgcatgcattcgttctaatgagtaaatgatcatagccattagtggatgctcttgcgtgtcaccctagtccctcctcagatccaggcacacattctgtcagctgcttagagtgttggctgctgcccctatcagctgagcctctctctgggcagctccatggtgcctttggtggaaagaggaagccttggccaaggtcatcaacactcaccccctgggcatcctggatccgatggccatcccatgtggggatacagaatgcttagctccctgcctcaaactgggacacctctgctgggccatcccagttccagagctccccttgggacaggtggaggcctccgttgtgactacatcacagtttggcttgtccctctggcctgtcctgctcccccacttccctatagcacttcccagtacatttcttgtctgtagatttcacactcagagtctgtttggtacctgaaacaacaggtagctatccagacgctgaatggaatctgatttccattttaaagcacatgctgatttcacttgcttgtatttttggaagctttttgaggagtggccttgggttctctaccactcctgtctcctaccctgtgtgtgcacctttcgggcactgtcagcatgccttggtcacctccatgactcctggtgggaagaatgtggcctagctcctgggcagaccataaaacttaagactgatggaacggcccaggggctcagagggcatcacccattcaacccttccaggtatgaatgaggaaactgaggcctagaaagggggaggcctttttcaaggacacacagtgagtggtgcctgtcttttccatctttgaaggtgatggtgtcttgggatatagtgagcaggctggtcttaggagccagacatgtggctgttgtgatattatggcgctagggtccaatacatgttttacggggtgcccccatggcagaggggtggccaggccagcccaagagtggctatcagcaatggcttctggaaggaggacagcacaggagttgaatgggcatgaacggtgtggaagagagaaagcagggagtttcaggtggagacacagctgctgcagaggtctggatgaggtgtgggggagagtgtgatctgggcagggggcttggaaaggcagaagaggggatgggcgcgtgatgggtgggaggcagcctggactgttgggctggcaggcggcagatgctcaagtgaatgttgtggccaagaattaaaacttttccccagtggaggggatgggacttgatggagagtgacttggggagagccacgcagaggccttacccatcatggtccccactgaccctgcactgcctgagccaactgatgctcagtcaatggttgtggaataaatgagtgaacgaatgagggaagggaagatggtgctgaagaggaggcctccagctgcactgtggcgggtgggtgggagcagggacgagcccacaggctctgatgaaactggcttttggttgggggttttatccttctgagccagactgtgggtccctaccttccctcctgtcactggagaggtccatgggcctggcttcgatgagactctggggacgtggggagtgccggtgggtgagaccagccgagagcacgtacattggcatcccccacagcagaagcccagagaaaggcctcaaagtcgcgagcccaatcagatgaggtcctggccctgccccttggatggcctcatctcattacaccttgacccacttcccagcccagctccctccagccccaggcagcgtctgcagccctctttgaaccattccccctcacagcgccaaatgaaaatgtttgttgaaaacaacatgtgcataattaaagcttaatgagcgcttgtctgtttggaatgtgcaattagatttacaatcggggatgggagagagctccaaatggctttaaatggagctgagagagaggataatttttgccataaatctgcagtaatgcagacggtgtgtgagctaccagtggcagtaccagggaaggaagaaatacaggcctgccaggcctccatgctatctatgttagggggctgccctgcccatcaggcccggccctctgggcagctgcagctggtgagtgtactgggatgggactcactggtggtcctgggggcagagctgccctaggttggagctggagttcctgcctgcagcttatgagatctgcgatccagccaactgtgaggggctgaggggctggtgctgagtccagctgcccaggtccccaggatcccatggctggggcgagattcctgcgtcatcaccacgttcacccccagcctgcaaactggcttcagggcagagccctagactgggatgtggccctctactttgttctctgctgtttcccagtacccagagcgtacatagttaaggcctcagttaacatttgttggatgaatgaatgcctcgttaccagactcttgccttcaacaggtcactctccctctgcaaaccccatttctcccatatctatcacagagaaatggattcggctactgctgatgatgtcagctcttccgtctctggggttctgggtcaggagcagataatgactagggcagtgtctagaccagcaccatccagtagaaatacaatgcaggccacatacatgattttaagttttctaatagccatgttcagaaaaagtgaaaagaaacaggtgacattaattgtaatactttagttaacccagtatatcccaaatattaatattattccaatacatcatcaatatacaaatattgacaaggtattttgcattcctttttgttgtcatcgtcatcattcttgctctgaagtctttgagattcagtgtggactttatacttacccacatctcagtttggactaggcacaattcaagtgctcagaagccacgtgtggtaagcggccaccattctagatggtagaggtctagaaagagcacagttagagcgaggtaggtgggagggggcaatgattcccacctcccagaggagcccaggtacctggcagccctcacctgtggtgctatagtgaccactgccatttttacactacccctcgatgccttttattgactgaaataggtggcaccatccaagccaactcttgttgggggtggggacaagggtcctgaaggggcccacagcactgagcttgcttacaagggacattcccagctcctgcggcaggcagtgcccaaggcgttgtccttgcttctgatagttaaggtcccaggcctatagtcatgaggtcaccttctctggttcacgtggcttggaggcagtgggggtgggaagccaggatgtactcttaggagtcagcagcctggacttcagactcagctcaggcaggtcttggctgtgtggccttaggcagatcccctaaactttccgggcctctgtgatggggaggatttatcaccaggcagaatacgaatgtgcgttgtgcccagcaaagcaggcacaccaatcaggagaaaaacatttttgaagaattgttaatatctgatattttaggaacaaagcatgaaaatcatcgttgttgggaaaaatcggccctggcagttggactttcttataaagactttaatttgcaaattttatttcaaattacatacagtgggcacaggcatcgagggtcttttccatgattaagacctcagagatttgcacaaagccccactcagtttcttcatctacagaagagaggtagttatagcaactggcaggattcttaggaggattcaataataaaataagaaatagctaacaatgattgagtgccttctctaggtaggcaatgttctaagcactttccgtatatttatttaatccaaatgatagtcatacccattttgcagatgagaaaactgagacacagtaatgtagtttaaaaaaaaaaaaaaccaacagcttgaaagcaacaagcccaggatttgaaccctggcagccagaccagggcctgtgtttgtatccactgtgccatcatgtttctccaagtggtgatggacctggagttggtgtacagggcccgggtcaggctgagactgaggcttcccaggccgtgctctattcctgttcctcttccatctgtgccgggctctctgcctgcacccctcccccggcatcttcctggccctgatgtgtatttccccatgagacttccacataaaaccgcactctcggcaggacctaggttgcagctgtctctctctttagagctgtgttttatctgtgcagaatgagcgttctcaccgcccaatgtggggcaggcgggagcagtgtgtgctgctttgattgtttcctctttagatcttggtgaggctcagctctcagtgcctgtgactggctaggctgagggctgtgcatccctaggctttgatctgtgtctctgtgcagaggggaggagcaacagcttctacagaacagctgctgctttggtacctgggatcaaggccaagttcagacttcctgggtggctttggacaagttcccaaccactctgagccttaccttgctcatcttgacagtggggctgctgctcatggaagccttgggatttctagggggttccagtgagatggctggtcacagctctgggataagggctggtatacagtaggtgctctttggccagtgctcacagcagccttggatgtcatattccctgctccttgcctagtcacctcctttgcttcctacatcatggagcctccaagtcactttttcaggatgcttctctggaaagaccctctgccttgcttctgctccccttggctaaccttatcctggcctttgtcacatgtgtcaaagaagaaggcatcattcaatatcgaaagcaagaagctgaattcattggtatacttcgcaagggtagtctccccaaatcaagcaagaggctgatcttttcagggtttggggaagcatggggtcctgggataggaggactttcagagcaggaggttctgagactggctggctgtctccgtggtggacatgtggctattgggagtaagactattgattgactgactttcagaggtggggctgtaaagctcccagtgacaaatgaggatgagctttaagctggtttggggattcattgtttgcagcttgggactgtggtcaaagaacatcttttcctttgtagatttggagaataggaaggttttattctccctccatagctgtcatcttctccaaaggactgggggttccttgaaggcaggggccgtgtcatcatcattctggcatgcctggcacctagcacactccctgtcacatagtaagcacgcacaagagatcgttcaatgaacagtgattgttgcctccaagtccctttgcttttctctcttttcagtgcctttgtgatgatctatttgcatagatttcccaaggggcagtggcaaaattcacttgtagattccccagtggctgggagcatattcctcagcacgagatatgtgcctggtacacgatacaacaaaggcactgcctggtctcatttcgcctcagcacatttgaatgagatcttagacccaggaccaagagtgggagcaaatgggtagaagacatgggagggacagggtcaaggtgaagaggctgaccttgaacaggagagagataccttttcagactaaaggaaaggaagtcaagatgagcatgatgtaaataacgtaggggaggttgggagaattgagggaatatctgatggcttcaattcctcagtgacagaggagacaatgtcatctgctagactgagggagatgggggctgataaggggataggagttgatatatcataacaatgataataggtaacatttattaagcacctgtcaaaaatagttaatatctgtaacataatgcttaataatgctaactcatagctgatgtctgataacagataccaagaaccttatgaggtaggaatgtagctgtcataattgttgttttataggtgaggaaaggaaggcaaagtgaagttaaagtcactgagctcgtaagtagtggaaccagtcgtcagatcaatgctgttacccagtatgttacactgcacataggagttgaattaagtccaaagctgattttagatggaagcttttggttaggtccaagaatatgggtttataaaagcaagcaagacagtgttaaggttggagtttgtagccagaaataaagaagggcctaggaagaggtagatttcggtggatagagaaagggagagtgttccaggctcatggtgggacgatgtgtaagagtgggggcacttgctgggtgtggtggctcatgcctgtaatcccagcactttgggaggccgaggcaggcaggtcacttgagagcaggagttcgagatcagcctggtcaacgtggtgaaaccccgtctctaaaaatacaaatttagccaggcttggtggtgcatgcctgtaatcccagctactcaggaggctgaggcagcagaatcacttgaacctgggaggtggaggttgcagtgaactgagatcatgccatttcactccagcctgggcgacagagcaaaactctgtctcaaaaaaaaaaaaaaaaagtgggggcactggaggctcccactatgctgaggacccacgggaactgagacttggggctgccctggagggtcctggatataggctaagtgatgtggagtctctgcagggtttggatctgaggagtgaagcgattgcccaaatatcgctagtgatagccaaggtgtacgatggattgtgtgacacggacccaccaacatgggtttgtggtgcctgtgtgtgcccctacgctgtgcataccacatgcactgtatacctttgtgttcacactcagcatactcttagggaagctcagcagaaggatgttgcaggtgattggatcagagggatgtagatggcagggagaccagagtcaccccaggggtactgactgtgggactgtgtggaaggtgacagtttctgttaagacaggggagtgctggagaaacagcaagtccatgtacatgttatgagttcagtgctggaggtgttgaatttgaggtgctcatgggcaaatgggggagatagggagaaaactatatattagaatctggaggtaatttggctaaagatgaggatttgagaattggtgatgttgcaaccgtgagtagccatgacattttccagagaaagtgtgaatcgagtgagaaggaaatgccagacccacattgctatgcgcctatccattccacccaaccactcaacccattttacccacccgggaacccacacgtccaggcatctatccacgcatccccaacacccatctcacccatccatgttcatctcgtccaccatcccaatactcttcccatacacttgtctgttcacactcatgcagccatcccttttcacctatccattcatccactcctccctctcatcccagccatcccatccatacatcccaaccacccatctatttgtccatccacccatctcattaataaaccattcattaataatcattttatattgattacatgttgaaatcatgttatgaatatgttgagttaaacttaattttgatgatatattttatttatctgttaatatttttaaacagtggctactacatttaaaaataatgaaaagagtataattggattgtctgcaacacaagggataaatgcttgaggggatggaaacccattctccatgatgtgattattacactttgcatgcctgtgttggaacatctcatgtaccccataaaaaaaactgtggctactagaaaatgtaaaattacatatgtgggtcacatttgtaacttttattatatttctgttggacagtgctaatgtgtacaatccctcacccatctattcattcacccgtccgtcatctgccgatcatccgtctatccatcacccatctatcaatcatctatccacccatccattcgtccacccatctgcccatccatccatcccatcctttactccttcctcctttccatccattcatctacccacttatcacatctgtttaccccacaaatattttatttatacctgtcatgaatcagtgactctgtggtcataagaatgagaaaactgaggcttaaagcagttaagcaatttgcccaaggtggcacagatggacctgggatctgactgtctaagatcagggctcctcaccttggctgcctatttgctaagtttccttaaaaaatcctttggggaagcatggtgtgcttaggttgggggctggctgttggaataggggccgaggagctcttttccctgaggggaccacacagggaaaggagaggtaggggagagacagatgccttagaagcccctgtaagctgtgtccccggtggccgtcatgaaagggttatccctacacattcgatatttgcaaaaatgtgggttctttcagattccaaaactcatttccatgacaaaactcttgggaagagaagatgaaggcctggcttttgcagaacaatcttccagctgtaatgaggactgaagatggcaatgggaaaaggaattataattagaatatgaaatggggaaaattaatctattccagtcactggtaagaggatgttctcctggcgttcatggaaattcttaagctgttgtttctccctgcatttttttctcacattttaaagcatagggaaggctgtgtggtatgaaaaaaagatttttgaccaaggaactgataaactgtgaaatatgcatagaattgaagttcatgtgcatctttgctttgtatgtctctgtatgcacattcagtatatgtttgtgttcacatttgtgtgagttacatttaaatggctgcagatgcatggaatgtttgtacacatatgggcacaccctgctttccttgtgtgcgtgctgtggttattgtgtgcccagttgtataaaggtctctgacatgtgcacactcatgcctgtgctgtgtgtgcgttggttggtgttacccatggacatgatacatgagtgagctgaacgctgccgtgttgaacgctgtgctgcatgacctgggtccacacaaacatgggtttgtggtgtgtgtgtgtgctgcccatgctgtgcacacggtgtacatcatatacctttgtgttcacacagtgtatgcactgcggtgggtgtagatgtgggtgtttttgatcttgtctgtgcacatgtggaggaggaagtagccctgctgtgtctgagggcagaggtgactttgtgacctctccccttggcttccaagttcatttagccagaaaaggtcccaaatgaggagggggctgcaggggtaagccccaggccttagagtactggaagccaagccagagggagcctgggaaccctcagtgtcccccaactattccttcatgccctccaagggctccgatgtggtggaaccctggcagaggtgggcaaagaacaggcctccccgcccactcagggcctctgctcactgctgctccgcagctggttctgagcccagcaggctccagggcactgtgcaaggtgcccaagggtaactgaactgaggagactcaggccctgcctcgggaacctctgccagcttctcaagtgccccttgaaagccagaagcaagctttactacagcacgtggcagctctttcctagacattggttgaataaaggagtgaatgaataagacaggctctggtgacctcatgggaatccactgcccacccccttgcctgcccctaacacactcgtgtcggagaccaggcccccttgccctacatctccagtaccattcccactgctctctgtggataattcctccctctcctgaacctctaacacacttatcaagcacctgttatgcgccaggcccaaggcagactattgattatatagtaggctctagaaaagcattggtccctgctgtgaatgcacttgcagctagtgggagagtccaagcagaaaaaatccaacaagggactcttaaatcccatctctccccagctgtgtgatcttggacaactgcttatcctctctctatctgtttgcttggttttagcagggaaaagaatattttcttcattggatcatcgtgaggattaaatgaggtcttttatgtaaagcattttgctcagtaccaggaatattcattctgtcaccaaatatttattgattgtctactgtgcttatcggggaatgaagcagatgttggcccctgccttgcagtggctctgttctcaccagcatttaataaatggtgaccattcaaaggttttttggacatctttccctctgtttctcatgcatattcctataccatactgttcgattactattgctttataaaatgtttcaaacacttcattaaacttaatgttcctccatctccaattattcttcctattagggtctacttataagttacatgtgatttttaaaaaattttacttttgtcaaaatgatcaatggccatggtcacacatcaagtcaagtacccaggagcttttgctgagagcgcccccaccctgcctaatttatagccccatccctaatgccaggctctgggagatttggagatgaccagacacagttccagcctccatgttgcttccactctgggacagatgacaaatgtggagacagtctatgttataagagcaacagccagaggagatgcgagcatggcaggcctcctggaggaggtagcctctgagcagggtcttgcagcatgagctctgtgtgcagtgtggtggatggagtcctgcatttggggtcagtgcccaaactctaggcatggaagaacctttttttaaatcatccagtagtcaccaagggactctccccgtccctgtgctggggaggctctttggtgtaaccatcaacccaactgcctagatgggaagataggcctggtcagaggtgatctgcatgtggtagtgactgctttatttacttattcaacaaacatttattgagtaccttctctgtgccaggcactgttctaggagcttgggagacatcaaggtacagatagacaaagatccctgatccctgggagcctccattttagtaagaggaatctaatcataagcaatgaatatagtaaatatagagaatgctagaaggtaacagggacttcggaacaaagaccaagggaaggcggggcgagggcgcgtcgaaaatggtggtagaaagggtggtgggctctcagcccacaggggctggggctggcatctgagccagttatcaagcaaagcttctctgagtgaaggcggctgggtaaacagacatttcacatggttgtgggcgtgtggatttctacggcctccgtgagggcagctgggtgatgtctgtctaaattacaaatgcacatacagttggatccagcaattacacaaatgaatcctacagataaactcacacctatgctcaataacagatgcacaaaaatatttatgggagcaatattgggatagcagaaaactagaaacaatgcaactacccatgtgctcagctagttgaatatatgtgttatatccacactgtggaatactgggtacagaaaaaagaactatgttctgatataaaacattttctaagatgtgttgctaagagaaaaataaagtgcaaaactgtatagcatgctgtcatgaatagaataaatgactctaaaatgtgtatatgtagacagtctttgaaatgatataaaaaagctggtagacgttgcctctggagaggggcagtggatggctgggaggtggggtggtgttgctttttgtactcttggaattttgaaccatgtgaatatatcttaataaataaatggttcaattaaaataaaatggctgtttgctattggtgccccactcagaaccctttactgaccagcacagacatctcccacctgccttgagcacaagctgcctgcaaatggctcacagccagtatagttctctgaagacttgtgcttggtcaattgggggccaccttgctcagaaggttatgtctccccatgtcccctaagggcagcccatggcctatgacttccttacctgggctacaacagccaccccttgcttcgtgttggtactaactctgcatacaattcatgccccagagttccccatcagagcaggctgaaagaagtcttcaggcaagaccacatccttgcttagctgtacccactcctgtccggcttgcctcccacacttacaggttattcccaaggagtactttcttaatagccacatgcatctgaacccttgcctcaggctctccttctagggaaccctatctaagatacctagcttaagggaagggaactaactggaattaagtcctctccatattaatgtgttgagtcaagtgctctacagtgcaacatcctatgaggaggggcctacaggcaccatccccatttaacagatgaggaatctcagaagttgaggcaccaacttgagatcacacttcagggcaaagagggaggcgggggtcccagagcccacatctcttcccctgcacctgctcctgactttttaggcagatttacagggaaatcttcctgaatccagacttagcagcttctctgcacacaggatatagttcctgtacatggtctctaccatagtcctcactgcctgtagccaggcgtggccctaggggctgggatggcataggtgatgggccaaaaccactcaggatggcaggacccggagggcatgtctggggaaggctgtcatgatcccaaggctctggtgttcttggcctcccccagcacatgggattccagctctagctgatcacctgatataattttgatcaagggaggtgtttgcatacttccaaggatgggcagctcagcacatggcaaggcagcctgttgtgtctatggacaagttatagagggcagaaaggttttcctatttgcattgtaagtgtgattaacagcatgaacctgagcactcaagggccgtggaacaggggctgctccttccaccctagaggtagccctgctgaaatggggctttgggcatcctgggctctgatttgccttctgcagctcccacagtcccctgcagtcagtcccctgccctcctccggctgcttctcctggtgccttcctgagagcattttaatcagagctgcttctccctctctctctattctagtttgatggtgacagtgcctacgtggggatgagtgacggaaacccagagctcctgtcaaccagccaggtgggtgcctcatcctccctgaacgggtgtcttaagatttgggctggctggatctgagctgttcctgggtggaggtagggggtgcagaatggggccagcacagcccgctgctgtcttctctctgaatgatcaagaatagcaatagtctccttaaaaggtacaatcaaagtgggactatagtgttcgtaaattaactacctggctactgttggcttaaaatggattgggaacttgatgaaacttgaaatgtattgcccatactccccacgcttggggcagcttttcagcagcagtgagttgaggtgcctgctgctctctggtgccgcctgcctcttgccaccacacagcacccacggggacatgttctggtttggatgcacacatgcccttgcgtaggcatgcatggttctcctgcctgctgggagttgttgaaggccacaggggagggttgtggacagggcacaaggaaagagagcagaaggtcttactggtggcaaaggaagcagagtcattcctgggcaaggctgtctcgaaccccagcctggccctctggggggtcatagttgccagttggaatcagattttccactgagagcctggtctctgaaaattaatgtttctctcagctgggagcatcctcactatagactatgatgccacagagggtccttgctgcaggctgagggtccagggagggtctccctgcagaatgtgatgccagggtgggtcctcactgcaggctgggaccccagggagggttctcactctaggctgagatcagggagggtcctcactgcaggccaggaccctggggaatgtcatccctacagaaagtgatgcaagggtgggtcctcactgaaggctggggccccagggagggtcctcactgcaggcgggggccccagggagagtccttactgcaggccggaaccccagggagggtcctcatggcagaatgtgataccaggaagtattctcattacaggcatggcatcgtggaggatggttccctaaggcagtggtgcttgctgggtgggaccagctcgggacactgattggagagccaaggagggttatagctgctgagaaacttgggaagctggagggcaaccccggccctggagctgacctctaccctctgtctctgccattgtgggggctatggcagtccaagttgggtggcccctcagccatcaggctgggcacatattttccagatggggcaatagaagcctattaattcacaaatatttatgtccctattctgtgacaggtcccatggaggccatagatgagtaagacatgggcctgtggccctagggggcactactagtgaggaagatactgtagtctcagtggggcatggaagctctgctgcagggtgctgcgccccctcccctgccgctgcaggatcgctcatgccggggccaccataccatgcccctctctggcctgtccctgtgtgagcataatgctgctgctgcaaagctgcctttatattgcattgacatgcgccaacatgcaagactggtgggcaagactccaggccttggaagtggttattttggaagagtacactgatgtcatttaattgtacataatcaactgaagtctcatctcagcagaccagagttagccctgacatctcatctgagccttttcacaatgtttaaatagtatttttgttaacatattgagccctggttttcagaactatattatggtgaattctgttctggaacctactggaaagcattggcaatgtccttccaccaagaaggaaaagtgggactcagtggggctctgtgtctgctctaggcctcggcagaggagagcacagtcgtttggagaggagacttggtacaaataaatgtcaccctccccaaaccattaacagtcatatcctcaacaattcccccaacactttgcagcttgcaaagcctttttctcaatggttatttcagctaatcttcacaacagcctcgagaatgagtagacgttattgttcagtcaattttatagatgatgcaactgaagatcaaggatgttggctgattcaatcaaggtgactcagccagggagcactagagctggcattcaaacttgtgaagctcagactcggagctccacaagcctcccttgccttgtccactgacttgcctcagcctaaatgtcacttctgcagagagctctttgtgactgccaaacccacgttaggtcccctttccatgattctcattaaaatggcaccaggtctttttaattcatagtgacaaaaattcataatttttgtcacagtggtcatctacttaccttgtgatgacttagttaatgcctgatttccaccctaaactgtgaccaccatggggaaaggatctggtctctctggtccaatgctgtgtatcccagtggggcatagtgtctggaacaccgagagcactcagaaaatatttgtgtaatgagtgatggtagcccctgctcttctctgaacttcaatgtccctaacagtggaacaaggtggttggacttcctgagggtccttctaaatcttttatgctgtgacccagagggtctccctaacttaggactttatgaagaagatatcaaaattctctgagattaattaagtctagccagtggcatgagccaatcttaatgtgaacaaattttgcaattgcagttagatttcttatagtgtatccgttagtttttcctgcataacaaacacctcaaaacttagtggcttaaaacaacaaatgtttatctggttaatgattttgtgggtcagcagtttaactgagttcagttgggtggttcttctggccttgcttaggatcactttagcagcagcaatacattgccagatcagcagtgggctggttggtatgggaggctcacctgtgttccacatggtctctcagcttccagcaggctagctccaggttgttcacatggtaggagaagggttcccagagcagcaagagcagaaattgcaagatttcttgaggtccaggcttgaaataaacacacatctacttccaacacattctattggtcaaagccagtcacaggaccagcctagatcaaggaatggagaaatagcctctacctcttgatgggaaaggctgcaaaatattgtggcctttttacaaactaccacatgtaggaaacatatgggatatgattcatgatgattttgttgaaaaataacttagacttttctggtacctatagctccttgcagctcagtgggaccctactagcttctagacttgaatgatgaaagttctatatatttccttcctcttttccctggagtgcttcttgaactcacaacgcgagcgcgcgcgcacacacacacacacacacacacacatacacacatacacgtgaacaccctctcacaatgtgttgtctcatcaactgcaagaattgtattgtccaaattactggattaaggattgacatcaacatttgggtaaaatgaagccctcacagccactagaggattcagaggataaacactctaaatggcttaaaatatgttttataaatacagttaaatacaaggttcacccaatcagcaaatgtttattggacacctgttatatgcaaggctgtgaatatcagtgggaagccatttctggaaaacatttgcttccagaacatccaatcaatatatgtatatatttttgagatggagtctcactgtcacccaggctggagtgcagtagcttgatctcggctcactgcaacctccacctcctgggttcaagtgattctccagcctcagcctcccgagtagctgggattacaggtgcctgccaccacacccagctgatttgtgtgtgtgtgtatttttagttgagacagggtttcaccatgttggccaggctggtcttgaactcctgaccttaagtgatccgcccacctcggcctcccaaagtggtgggattacaggcgtgagtcactatgtctggcccagaacattcaaatcgtattacaaatttgttctttaatgtaacacttctcctgagatgccatcttctttacttagaaaccgcagctgagacagaggttcccctagggtatgtattagctgactgtgtccctttttgaaaactttcaccgccgctctacgggcttgaagtgtttttttttgcaaatacattctccattgtttggtttttgcaagactccacataaattttcccatagctgctttagcttctacaaatgatcacactccctctccctccttggaccttgggttacttttgtaccagacttgccggggtggcctgagaatgagatataattctcagatagggctgtgtccccatcagcagctccaggggggtagaggacctggtagaggtcagttctttcctgttgagagcagactctgtccaggagttacagaaatggatatttcctgatgatgtgacccagaaagagtctcctccttcctgggacgaggtgaggaggaaagggaagtgggcttgggactcagcagacctggattcaaattccagctcctccatgcctcagcatgggccagatttccttatgcaagtgatagcagcttcctatcaaatgggaggagtagcagcgtctgcctcctagagtgtcatgagaagtaaatgaggtgtgtgtgtattgtggattctgttgctgcctcaccagagtcctgctcatcattcagctgctgtgagtgttggctgctaactattcacagctactctttctttggaaaattggaactgtgaacccaggagaggatagaaggggaggtctagaaaccgatatccttatctcaaggagtgaccaactctgcaactcctcatgggctccagctaatccagccagactccagccaccaaggccaaatctttactcagctcctcccctgtcatgtcctgcctccctcccgcccttcttctaagagccctcttcaagtcactttcacaggcatccccatctcaggctgtacttcagaggaagctaaactaagagtatgtaaagaaccagagtcagaaaaactagctatgacttattattttttaccatatataatgctttggtcacacaagagcttctgttcacctcttgcgctcatttacaacttggtgtttttgtatgcattgtttcctctgatgggaatcccctagtgtttttcaaccaacaaatgcctatttgttccttcaggggcactgcaaatgtcacctcctcatcacagccttcctggctgtgtgtagagttttccactctcttagctctaaataccacttctgctaaagagctcacattttttacaggaattattgaaagaacttgtgtgtgtgtgtgtgtgtgtgtgtgtgtgtgtgtattagagtcagactgaatgacatgaatgacatcagatttgcagtcttaaaagctctcaatgacaagaatgaatacagggagaccaagttgagagggttggtaataggccaagtaaaggatcaagatctagattgtggcagaggggatggaaagaagtagatgcattggagataaagttagtgggtcttgacagtgatggacatagagggagagagaaacggaggggtaaaggatgactcctaggcttctaccatgagcccattttcaggcatggtggtaccattttctgagttggggaaaccctggggatttgcaggtttgatgatgccagacttggatgtgttatatttgagatgctcatccacatggagatgttcaagtagatagatgatggtacaaatcttgagctcataagagaagtaaatttggaaatcttcagcccatgatatcaaaaccttgggagtgaaggagatttatggagagagggaagaacgagaagagcagaggaccaatgactctgagatgttgagctccaacatttgaaggcaaagtagaggaggagaagactgtgaaatagattaagaaggagtggtttgagaagtaggaggagaacttggagtcttagaaaccacgggcagagtaattcaagaagagaggggatctaggtgaaaaggatgttggatccacagttccttaaaatttatcaaaggataaataaaatcctttgataatgggatcacatcaagttaaaacacttctgtacagcaaaggaaacaatcaacaaagtgaagagacagcccacagaatgggagaaagtatttgcaaactacctgatgagattagtaatcaggatatataaggagctcaaatgactctataggaaaaaaaatctcgtaatccaattaaaaaatgggccaaagatttgaatagacatttcttaaaagaagacctgcaatggcaaagaggcatatgaaaagttgctcaatatcactgacaatcagagaaatgcaaatcaaaactacaatgaaatgtgatctcacccagttaaaatggcttatattcaaaagacaggcaataacgaatgctggtgaggatatggagaaaagggaaccctcgtacactgttggtgggaatgtaaaatagtataactactgtggagaacagtttggaggttcctcaaaaaactaaaaatagagctaccatatgatccagcaatccaactgctgggtatataccccaaagaaaggaaatcagtatattgaagatatcggcacttccatgtttgttgcagcactgttcacaaagctaaaacttggaagaaacctaagtgtccatcaacagatgaatgggtaaagagaatgtggtatttatacacaatggagtattattcagccatacaaagagaatgagatccatttgcaacaacatggatggaactagagatcatcatgttaagtgaaataagccaggcacagaaagataaacattgcatgttctcacttatctgtggggtctaaaaatcaagacaatgaacccatggagatagggagtagaaggatggttaccagaggctgggaagggtagtggggcagaggggggacatggggatgattaatgtgtacaaaatagaatgaataagatttaatgtttgatagtacaacaaagtatagtcaataattgcgtattttaaaataactgaaagagtataattgggttgtttgtgacacaaggataaatgcttaagggaatggataacccattctccatgatgtaattattacttattgcatgcctgtatcaaaatgtctcatgtactctataaatatgtacacctatgtacacacaaaaattaaaaataaaaaatgatttgataaatgttaaatcaaacatttaaacatactcaagggaaccataaaggcaccagcaaaacaaaccttaaggtatactttacaagtttggtgtggggaaggcatttctactatttaaagcctcagaagaaaagacttaaaattggaccataaattaacataaaactaaattaatataaatataaaaattaacataaaatcaacatatgacttttgtatggccaaaccagcataagtaaagtcagtagacaaaagttgggcaagaatattttcaacttacaccatagttgaagaactaatcacccttatacatgaagacttgctagagatcagttcaaaaccctggtagaaaaaaaggaaggagatatgaaccaatagtttacagaaaaagaaatacaagtggctcttaagtatgtgaaaagtgctaagaatcattcataaatcataagacagccattttttaccaattggattgaccaaaatccaaaggtttgataacacactcggttggagttcttatggggaaacaggtactttatacatttctgtgggcagggtaaatggacaacatctatcaaaattgcaaatacattgacctttaacccagcaattcgtttttttggaaatatgccctacagatatatttgtacatatgagaaatgacatattcaagactattcattttgatattgctttactaaaaaagatgtaaaacagtacagtatgctaccatttatacaaaaaggtgataagaatgtatatttctaagtgcttgcatttgattaaataaccttggaaggatacatggacgctagagtggctttgcgcgttgtacatgcatgtacctctgtgtgtgtgtgcgtggtatgggaactgtgcaggtgctgggcagggatagaaaaagacttttcaccgtatctttttatgtttagggagttttaaaccatgggaatttattataactttagaaagttaaataaaatgtaagaagaaggagagagtcagttagctcaaacacttctgagggattgggtgagatgaaagttgaaatgtgtccagtcatcttagcgaaaaggaagtgactctgggcttcagtataagcagttttgatgtgcagggtcattgttctggtcccatgggcagattgagaagcgtgaggtgaggacatgtaaacagtaaatatagacaacttgtgtgagaaatttagctgtgcaggacaagggccagggccgagctcaatgagatgaagattccatagaagggattttcttttttttttttttttaaagaaaagtctttagaatatttagtcatcaatggaaagtgtcaggagagagggtgaagctctgggtttaggagggggaaaggctaagggatgctttcagatttcagagaaagtgggagggtctggatcctgctcagaggtggtggctctggccttagctgggagtgctgggtgtggaggacagcagagaaaaggagtgtggctttgtagatgggttggctgggagcagagggtgtctgcacctgaaggtgtcagtcttctcagagagttggtgggccaagagccaggggactgcgggtgagaggtggtggggaggtctggggtatttgctgtggggcatgggagaatgagctcccggtgcttgtgctgtggggcagacaggtgggttaatccagggcaagagatctgccaggcagttgcaccagaaggacacaacagcttttttttactcaaaagagactaatgtaaaggatcagggaatctaagctgcttttagagagaagacgggtcccagggcctggggtccagtgcagctaaagagctagtggggagcagctggatggcaaggacaccttattcagagtgggacgctggctggtgattttggaagtgagcaggccatggcattggcaggggcctggtatgcctggggagcagggagctgcatgggggagaagctcctgggaggtgaggagcccactgcccagcacagcatggtggctgagctgaagggccctggaaggatgccggggtagggtggatgggaaggtgggacccagaactgaaggctggaagaatgaggggctggatgctgatggggctgggtgtgatgggatttatagggacaatcagcaggggtctgaatggatggggcagtggagagggagaaggatgtcagttcctctgaaattcctgttgaggcaggaggcaagcagaaggcgtgttctaaggcaaggctgggaaatagggtactttgttcctagagtgagaatcccagtggctccagagctgtttgcaaggggaatgacactgcacaattgaacataaagattctggggacttacacatgaggtgctccctggggagctctcaggtctctggggtgcggtgtgtgccaccaaatgtgaacctgctggctgtgagcctcacagggcatgcgcagcacccagtgtggcccctggccccactgcccctgtagcatcccttcccgatgctccagcagaacgtgtgctggagtacagccatcatgtcatacaggccaacatcctcatgctacagaatgaggcttctcagtgcctcacaccacacctggcatgcaacagacacacaagaacttggagttcgtgattcttgctcttggttccagcaccaccatcatgtttgtgcagcaaccttccttcacagatccccaagtttgcctggtctgtttctctcaccacttggatcaagcatctccccactagggtggggagatggtaccatcaggaggccagaagacaaggtgctgttcagcttctagaggagaactcagacctgccgctccctgagcactgaggtccttgcggcctcaaagtcacagcctccttccagcagggggcagtgtcagatgcccagaatgggaaaaagagccaggagctctgagttcgaggctccgccctgctcttaggccttcacctgtgctggtatcactctgaacctgtttcctcatgtgaataatgagggtagatggtctgttttttccagcactaaatgatgataccgatgatcaataacatttgccctgcacctccttaggctcaggctcaggggctaaatgttttccatgggtggtctcatttcatcctcacattaactgtgtaggtgggcactattgctgtcccattttacagaggaggaaactgcagcacagagaggcagaggagggtgaggctcttcgaaacaaataaaaaccctccccagtaaatgtattggaggcaggcgaccctcctgctgctgttgaaatctaagatttctgtcttagtaattctggcctctgagtctgtgtacactgtaaagggcaaagatgacaaggcttttattgctttaattaaaacctgggtgaagagctcgcgattcatattaaaatgaaattgtgtttcacccgctgtggtgcggagaaggtaacagcggtgattactgctaagattacaaacaatcaaagagaaaaggccttttgcaagcatttcctattaaagccacaaacatcacactttaaaaataattatggttgtgttatcagaacatgattcatgagttctgaataaataccagaggccttaaaggaaactgtttcaagaccatagattttgttcaaatctgatgaaatttaatatcacttcacagttggagaataaaatacaaggagggggaaaaagcccatcctgtgtatatggagagaattgagtatatatgtcagattgaactaatgagctcttccccatcaaccctaaacacatactcagaaaaaatggcctagcttctcttattttcactgagagaaaactgccgaggaggagtgagtacttatatctcaccaatcttaattttacatcccaatggccaaaaatatatttattttaaagctcttgattcctgcctatgagacgtttaaatatttgagggcgcaggcatggagacattggggaatggatggggggaggactttggtctgcatttatggtgcctcccctgtcataaagatatttttcatacaatgcagtgaatgtttatggcatatagttttgtttccttccaactattatgagagaaattgaatcccaggaaatgttcactctctctaaatgggatggaaacaatgatgatgatgtgggaagtgcaggggcctgggggaggggatagcagtggggtggacacgtgatttcaaggattttcttaaaaacagcacccttccccctcccagccacctcccagccacctcgaacttagcatcccctgtaggacctgagtttttactggggagggtcagagaatgaagattttatacattgttcattgctgtgtgtgagctcactggtgaccaagaagtggaaatgaagccagacgtggggactttctcagaatgggactgggttcttatcttctggagggtcaggatcctggttccggcccctcctcagcctctctccctgtgtcccctcagactggtcatttgtcctctctgggctctggtttttgcatctgtgaatggggattggatgaatatctctgagggaccttccgggttgacttacagccaagggctcagcccccttcacccactgcctgagcgcccaggagggacaatggtctgtcccagaggtcttccccacctggctgagtcacaccaatgctgagagggccccgcaatgaggctggaagctgtgtgtcacatttcagcccaccaggcatgatgataaggagctgggttataaaggtaatgacatgagaaggcagaactgggctcaaatgataatcttgacacatgtggctggggaagcttggacaagttaaccaagttttctgagcttcaattttgtctttagaagttcctcagagtgatgcagaagtaaattaagtgtgtttatatccaaagtggttattctagtgcttggtacatagcaattggtagttagcctgaggtgctactaaaatccccattttatagatggaaaacattattttcagtaaggtaaaatgggacaggtacatactcagccccaagtagaggcccggaagccctggggtcaggccagtgatgcaggccttcgaagatgcatctgcttgcgaggtagcagggtctgtgccaacagccacccggtggcgccgagctcatagttgggagggtgcttagagcagagtgaggagctggggcgcatggctttaagaggagtgtgtgtccagctgggaaggatgagcaggcggtgagagtgacccatgcacttggagagagagatggggaaggagggctctgaggaaggttgctgtgcattgggaggtgggatcttcctcttataagtcccctgaagaaaaccttcagtgaagttctttgtaactgcccaaaggctttaaaagttagcacagtgtgacctttggctattgactgctgggatggccctcaagggtgggaagtttgtggctagtggttatacttgtgccatgtgtaaactgagcagttgtagttttattgttgccactagccttcataaacaatggttggcaattgcaacaggaaagatataatgggaagggacgaggaagccttttaaaatgtatgtatgtatgtatgtatgtatgtatgtgtgtattttttgagatggagtctcactctgtcacccaggctggagtacagtggtgtgatcttggctcactgcaacctccgcctcctgggttcaagtgattctcctgtctcagcctcccgagtagctgggattacaggcatgtgccatcatgcccagctaatttttgtatttttagtagaaatggggtttttccatgttggccaggctggtctcgaactcctgacctcaagtgatctgcccaccccagcctcccaaagtgctgggattacaggtgtgagccactgtgcccggctttaaaatttattaacatggtatactcccaccgaaacggagaatatgtaaaagactaagttgagaaggatctggaggaaccagtaccctcactcactgctgtgtaaattggtaccaccatagatgccattttgcagtatctaaagctgaatatatgtctctatgactcagtaattcaactccacaaatgccttcgtatgttcaggccaggcgtggtggctcatgcctgtaatcctagcactttgggagtctgaggtgggaggatcgcttgagcccaggagttcaagaccagcctgagcaatttagtgagacccctgttttaaaaaattaaataattagccaggtgtgctggtacatacctgtagtcccagctactcgagaggctaaggtgggacgatcacttgagccctggaggttgaggctgcaatgagccatgtttgctccattgcactctagccttggtgacagagtgagactgtttcttaaaaaaaagtttataggagtgtttttcattaaagctcaaaactgaaaacaatccaaatgcccatcaagagtagactggatacatgattctgaaatattcttacacagtggaatactatgcagcaatgagaatgaatgatgtgtaaccacatgccatcaagcagatgagtctcacaaacacgttgagtgaaagaaaccagacaacaagacagaacattctagacaatgccatttacatacagcacatgaacaggcaaaactaatcaatggagatagaatgtgaattgcagttaccctagaggggggtggggagtgactataggggctttgaggggcttcagaggtgctgggaaggttttctcccttcctttgagtgctgtttacacaaatctgttcactttatgaaaattcattgagctgtacatttatgatttgtgcacttttctgttgtattctatgcttcaataaggtgtaaaaaaagaaagatcaaggcattgtatttttacaagtatctcaatttttagagacagggcaggcagggaagggaacctagccaggtttggtcatttgtatcttgtgttaatccggtcaccagggtagtaaattcccactgagagcatggatgggcgagccttttaccgcttgaacaatgtatttaacttcctgggagggaaagaattattttagcctcataatggatgatgagctgtgaaattgctctggctgtggcttgccccagggaagcaggtggcacgggcttccccagatctgctcagctctgcaggctctggccttccacttctatttccttgtggacagagttttaggaaatgtttgaaatatcaacatctttttttttttttttttttttttttggagacagtgtctcactctgtcgccaggctggagtgcagtatcacaatcttggctcactgcaacctccacctccccggttcaagtgagtctcctgcctcagcctcctgagtagcggggattacaggcacatgctaccacacccagctaatttttgtatttttattagagacggggctttaccatgttggccaagatggtcttgatctcttgacctcgtgatctgcccgcctcggcctcccaaagtgctgggattacaggcgtgagccaccgcacctggccgaaacatcaacacttaaagcacatgcatatgtgtgtgtgtgtatgtgtggtttttgtgatgctgtgctgtggtgccagaaaatcttgttaatggaatatgtgaagatgtctaagtttctctgggcacagacaacacacatgcttgtgtacagacacattcatgcacaaatataagcaaatacaaacacaacttgtaggcatgctcagtgtatggaaaggcacattgagcattgctgtgtgctcctgggcaagttactcaatctctcattgcctcagtttctgcagtgaaatggagataataaatcacctgactcttgggctagtgtgagcaatactctcacatgtgcacaagcacacacaaatgagattttagtttccgtttatttgcttaatggctgctttcctcctagactgtgggtttcgtgggggcagggacctggcacagggtaggagtggagttggtatctggtgagctaatatctggtgatgaacaactctcacaagcctactggtacacatgctgtttagacacattcacaagcacatctgacacacttattcacaggtgtaggcacatacagggatatacacacacacactcaaatgtgtccagactcagaacttaggagggtggatttatctgcagtttggggactctggactagaagtgagaacactgggttttggttgtggctccaggtaactctaatttattatgtgaccttgagtaagtctctcttctcagaggtcaaggactcccagctgcatgtgatggactggaatttgaaccacagttagtctgagtcaaagtgcttttaatgattcaggccgtgctatccccagtgtggtcatggacatgcagcatcccctggagcttgttaggcatgcagcatctcagtccccacccagaatctgatttagagtctcctaaatcagaatcttcattttaacagatccctacttgatttgtgtgcacattacagattgagaagtgctggcctagtgtactttgccttccccaagcactgcaagcaattagcccatgctgagggggttcataagctggtggggcacaggcacatgcctaccctgaggagcagttagagaatgggagaggaggcagtcgggagctgcctataaagacagaatcaacatggaagctcagcatcacacatgcgggagcccagtcccttctatttataaagaagcagaatcacacagtcgttaagagtgccaattcatgagctaggctttttaattttaaaaacagcatatattagggctaggcacagtggctcatgcctgtaatcctagcactttgggaggcccagacaggtgggtcacttgaggtcaggagttcgagaccagcctggccaacatggagaaactccatctctactaaaaatacaaaaattagctgggcatggtggcatgtgtctgtaatcccagctactcaggaggctgaggctggagaatcacttgaatccgggaggtggaggttacagtgaggcgagatcacgccactgaactccagcctgggcaacagagcaagactctgtctcagaaaaaaaaaaaaaaaacccacccagcatatattaatcatctcatagttactgcatgccaggaatcaagtgtggcttcatgtggtgcctctggcttaagatctcttggaggctgtgctcaatgtgatactcaaggctgtggtctcatctgatggcttgactgaagggggatttacttccaagttccctctattggttgttggccggattcagttcccctgaactgaaccattgagttggaatcatggctccatcccttcttaccagttgtgtggctttatgcaagcttcccatctctgtggctcctctgtgaaatgattataataataacacctgcctcatagagttgttgtgaagattaacaaattcatgtatgaaaagtacataggataaggatacctctacacatggtaagtgctatataaatggtttctgctattttttgaaaaaagctatagaaaagcaggtcagaacaatgtgactatgggggctgagctatatattttttaaaaattttactggtaactccgtaggttgcagcacaagcctagttcagagtggatgcttactacattttaggggagtggatgagctctgggtggcagccccctgatgggatgtttggggcatagttacaggagcacggggtccaggctgcaagaggagcaggccttgctctattctgcccagatcactgggccccatttgtggtgccaccacctgggaaggcagtagggtattgtggaagtcctctcaatgtcacctgggaggacaatggcatgagcagaggggccagcacacctaggtgataccacagaatgcagtgtttgggggctacagtgagttcactgtggctagtatcaggcaaggttgcaggacttggtccaggaggccttggatgccaagcagaggccgggaccctgttctgaagggtctgagcagggcagtgtccatggagcagtgtgctctaggggacttcactgctcagcctggtgtcctgggatctcggggcactcatgaggaccattctcagagaacttaagtgccttcatccacaggcagctggcgtgtggcacatttttaggcaatgctacttctgtcattttcagaaggtagaaatgggaaagaaaaaaaaagctgcaaatagacatcatttttccagaagcttattttaagacagaaacaactagagagcctactcatcatttttgctgcttttaaaatcagcactgccttgtgtgtgcctgggtacctgcatacaaggagcacaggcatgaattgaatttgatttttaaaatcccttgatccaattgcctctttttacagttggtgtaactgaggcccagaaaggggtcagtgatttgtccaaggtcacacagcctgtcagaggtaggggctcagatcttcatgagaagatgctaagataaggacaaggaaccaggagaccccgatgggccaagttagaatgatttcatgctgaacagcgtcactgagcgggctgcttcagacctttgctgacttcttagagcttgcaggaaagatggtgcagcactgagcccaatgccatagcagaccattaggatgttcattcattcattcactccaaaacatatttactaagcacctactgtgcgtcaggcagtggtgtaggtgctgagacgaaactgtgaacaaagcagtcaaacactcctagtccttactcgttcatgcatccttttattcagtaaatgtttattgagggcctactatgtgcaaggtactatccttggcccttggaatatatcagtgaccaaatggtggaatttatatcctagtgaaggggacaggcaataatcattattattattattattattattattattattattattttgagttggagtcttgctctgtcatccaggctggagtgcagtggtacaatctcagctcactgcaacctccacctcccaggttcaagcaattctgctgcttcagcctcctgagtagctgggattacaggcatacaccactatgcccggatcatttttgtatttttagtacagatggggtttcaccatgttggcaacgctggtcttgaactcctgacctcaggtggtctggcctcccaaagtgctaggattacagacgtgagccactgcagccagccataatcattattttaaagaagtaaagtatactgtatgtttgcaggtaaaagttctgtggggaaactgagcaggtaggggagctgggtgtgccagcaggagctgcacttgcaaacagggtggccagggaaggcgctgctgagaaagtgacatttgagcaacgacttgaaggggcgagggagttgagatctgggaaaggacattgcagtagagggaacagccagcaccaaggccccgcagtgggagtgtgcctggcatgtttgaggaacgtggctggagtggaggcagtgaggtggaagaactgggagacttatctgatcgacggctgggatggtcaagagcagctcccaaccacgtgtggcatgggcagaggtaagtgacccaggacagcatcaggagtgatcgtgtaggagcgatcgtgtaggagccaggatacccctacctcccttgtaaggcctcccagcattgacatgagggcagggcacgtgcatggggtgtggcatcccttgcagtgatttaaagggaagtctcagcatctcgcaatgtcttggagccaaaggagctcccattttgaggccactgtgggaaactcatgtggcgtaaggaaggatcatagccttcagatcgagccaggcccatatctgaaaaaatgtcgtggttgaatgtcttagtaataccagcatggagaagccattttctaagcatgatgtgaaagccagaaatcatacattaatacatttaatgttttaacataaatgtaaagcccttgatatggcaaaagttataaataagatcaagtgacaaattgggagtaatatttgtagcatgtaacatgcaaacacatagaataaaacaatagaaaaatggcagaggtaatgctggttttagaacatgaaacacattcgtgtagggtttacaaaaaaaaaaaaaaaaagaaaaaatggtggagggccagatttggtccacggcctgtgatttgctgatccgaactgatttaggaatgttgacatgtccaaaactgagctcgtggtcctccttatacccaccaagcatgttttcccctcagtattcctccaccagtggctcgagatgggaacctgggagtgatgttcgagtccccgctgaatgaggaaggcacgtggcatgtcagacaccatccaggctggccatagcgatgagggggtgtcataggaggtgagactggaaggagactgggccggatcatgcaggactttgcaggctacagagagggtttcacacacactgtatcctgagcgtagaggacatcagctaatgggagtatcaccatcagttttgtgtgtggaacctctaccctggctgctatggagaacaatttggaaggaaagagattagaagttaggagatcattgaggaggtgattacagcagtccttgtgggaggtgatgaccgcttggactaggatggttgctctgcagatggattgtggtgggaagatttgagatacatggggaggtggggctgacaggactttgtgattgattggagatggggatgagagagggaggaattgaacatctctcccaggtacccagcttgagccaccggtagaggaatactgagggggaaatggacttggtgggtacaaggatgaccacaagctcagttctggacgtgtcaaagaaatcatggcccttggaccaaatctgaccctccacctgttttgtgtaaataaagctttactggaacatgggatcctcctaagtttaaatattgcctgtggctactttcatgctatagcaatagagttgaatagttctgacagagaccatatgactcacaaagccaaaaatacatattatctgcagaaaaagtttgctgggcttttgtgtaggacatccaagggaagtaaagtatcaaagaggcagttggatatgtagctataaaaatgtaatttgaggctgggcacagtagctcacgcgtgtaatcccagcacttcggaatggaaagcagggaggattgcttgaggccaggagtttgagaccagtctgggcaatatagcaagacccggtctctacaaaaaaataaaaaatagtaggacatggtggcacacgcctgtagtcccagctccttgggtgtctcaggtggaagatcgcttgaatccgggagattgaggctgcagtgagctgtgatcatgccactgtgctccagcctgggcaacagagcaagaccctgtctcgaaaaagaaaattcaattaaaaaaacaaaaacagtttggcacggtggctcatgcctatactcccagcactttgggaggccaaggtgggtagatcgcttgagctcgggagtttgagaccagcctgggcagcatggcaaaaacccatctctacaaaaaaaattaaccaggtgtgttggctcgtgcctgtagtcccagctattcaggaggctgaggtgggaggatagcttgagcccaggagtcagaggctgcagtgagccaagatcatgctatggcactctagcctgggtgacagagccagaccctgtctccaaaaaaaaaaaaaaagactaccacttattggaaaactgagcttccttatctgtaaaatggggccagtgcctgcttcaggctgcctcttctcattcagatgctgttgcccacaagttatccccagccttgcgacttttgctacttaagttctgctgggactgctgcttcctaaagaaaaggacccccaaacccacccaccaatcatgtatctttccagagcctccccgtccctgcccggtgaatcacccaggatgctgctgaaaccttagcttgagtcagattgtgtcctgagcgagaacacatggggattatcatgtttgttcccagatagggttttagtcaacaaaactcctgtctaatgtgactgcctgtcattgtcccactatgatgcctctgtctgccctgatccaagcatttcggggtcaggaacagccacagagcagccgtggctggcagcgtggcacactgccggtgggagggtgttagatgcactcctgtgtgagtggcctggctcggcttggaggttctgcctgtagataaaggctgagaaaagatattacattcccctcccccacctcctccagaatccacgcttcattttaccggtatggcttttctctcctgtttggcttatatatggtatggacttttagttttttattttttaagaagcatttttagtccaggaaaatgacaggccaagcaaaaggcataattgtcctgattttcagaagtgctacaatactccagatctgatgtatggtgagactcgaatcagaaagattctattaaacatgtctggggtgggtgacataggggtattatctgagatgattaatttgactcggtcattatggacacagacaagcctgacaaaattgcatttcattccccgcagaattcataaaatcactatacccgtgataagaagttacagtgctaggagctcagctccagttgttggggtttggagttttgataagatgtcattttctgttgtgaaaacagagttgagaaacactgaatcgcactacagtcttttagcagagatggctttttttaaacttttattttaggttcaggggtacgtgtgaaggtttgttatataggtaagcttgtgtcgtggggatttgttgtacggattattttgtcacccaggtattcagcctagtacccattagttattttttctgctcctctccctcctcccaccctcaagtagaacccagtgtctgtttttccttttcttgtgttgatgagttcttatcacttagctctcacttgtgagtgagaacatgtggtatttgcttttctgttcctgcattagtttactaaggataatggcctccagctccatccatgttcctacagaagacatgatgtcattcttttttatgactgcatagtattccatggtgtatatgtaccacatacaacattttctttatccaatctgtccttgatggtcattcaggttgattccatgtttgttgtgaatagtcctgcaatgaacatttgtgtacacgtgtctttatggaagaatgatttatattcttctgggtatatatccagtaatgggattgctgggttgaatggtagttctgctttttgttctttgagtgattgctatattgctttccacaatggttgaactaatttacactcctaccaacagtgtaagtgttaccttttctctgcaaccttgccaggatctgttattttttggctttttcataatagctattctgactggtgtgagatggtatctcattatggttttgatttgcatttctctaatgatcggtgatgttgtagctgagatgttcttgctggtgcgggttttacttgttaaaatggcaagatggtagggcgaccatataatttactggccaaaccaggacactgtttagagtgaaataaaacattattaacgtgacactggaacaagaggcgtggagcaggcctgccctggcctagccaggactcgtgtgtgttgggaggagcttgaacagtggcagagcaaagctttggctactggtaggcagggcttcttgtcctcattttcataaatgctacccatatgactttggataagtcatttttcccttttgaacctcagtttcctcatctgtaaaatggaaatgccattttctacttgttctgcatatcatccgagggctttttttttcttgcttgggtgtgtgtgtgtgggatttatgctgacttcctgttaatgtgttttcccatctgtttcctggtataattctctcagctcttaggtggggttttgtagacaaggaaactgagtagtaggcagtttggataaattgccagaagccctcagcaagtaagattccccatgtcagtgtaactccaaagccagagctctttctgcagatcaacaatgtaactctcaatacatgagagttacagcacctcatgtttccatgtatttcaaatattcctcccaacaaagctggaaggttgttggaatacataatcaggattcaactctggggacacaagttgggttctcccaagaatcatttctcaccatgcatcaccagggagtgaatgccacttctccttttatgctatactccaactctcaacaagctctttggaaaaaggtcaaatcacctgctactccctcagtgaatcttcacctctttcttatacagcattgtggtgggaaatggagatcgatagtcaaaatggcagcctgagaactttcatgtaagcactaactgggataaagtagaaagccatcactaataaaaggaacacttcaacaagcagatacaataacaactgatttgtaaatacctaacaacatagctttgaaatatatgaagcaatacagcaggttgataaaatcacaatcacagtggaaatttttaacacatttctctcagaaaccaaagggtcaagcagaaaaagaaaagtaattgttgtttggaagatttaaatgatagaattaacaagctgaaaattataaatattgatcaaaattagcctgatactgtatcaaaggaattctcaatggcttttaaagaattaatatatttttcattcccttttgggtatctttttcttttttcatgtcagtggttccttattttattagccttttcaaaaaaacaatctcttccttgtatttcttatctaaaatttgttttctattttatttttctcctacagactttcggtttattttgttattctatttctaccatcttgagttgagtgctgagtttgtctttcttgtcttctaataaattcattttgataaaagtataatttttcattgtccatctctcataagttttgtcaggtagtgttctcatcatttcagttgtgatttcctttttaacacagaagttacttagatgattgctcttaaagtgtttaagtatgtaggaggatttccctccctccatttttttttctgctcgtttgtttttgttaataactaggttggtgcatgtactagtctgttctcacattgctagaaaactacctgagactgggtagtttataaagaaaagaggtttaattgattcacagttctgcaggctctataggaggcatggctagggaggcctcaggaaacttacaatcatggtagaagggtgaaagggaagcaagcacatattcacatggcagcaggagacagggagatggggaaagggctacacactttcaaacaacccgatcttgtgagaacttacttactgtcacgagaacagcaagggggaaatcagcccccatgatccaatcaccttccaccaggcccctgcctgaactctgagaattacaatttgacatgagatttgggtggggatgcaaagccaaagcctatcagtgtagttaggtcttagaatttgatctatctaatttctaccttttgaagagtttgagattctctttgtagtttacctggttatattttgtaagtgttctatggacatttgaaaggaataaatcaaaagagtgaattgcgttattcagatcctcaatcctcactcatttctatctgactgatttgcccattttatttatggttttatactaacagttttttacattttatatttctgtggttttatcaatttacataaaaatttgtcatttcttcttagtagatttatatcatttattgacttaagtgttccttttgatattttttagtgcttttttgccctgatttgtacttaatttgtaattaattttgccactctgctttttgttggcctgatacatccatctatctatctatctatctatctatctatctatctatctatttattttaagatggagtctcattctgttactcaggatggagggcagtggcacaatctcagctcactgcaacccctgcttcccgggttcaagggattctcctgtctcagcctcctgagtagctgggattacaggcactcgccaccatgtccagctaatttttgtatttttagtagagatggagtttcaccatattggccaggctcatcttggactcctgacctgaggtgatctacccaccttggcctctcaaagttctcggattacaggcgtgcgccaccatgctcggctggtgtctatttatttttatcttacaggtcattttattttaggcatgtctattataaaccatatgctgtatgtattttaataaaaatattttgtcttttaataaagcaattgaaatcattcgtattatgttatgaatatttagtcttaatgctgccattttatgaatattctttattatgtttgatagttcactcctgttttctttgcagatttttctagattgataaagttctgttttcttctactttctttggttcttccaatggtgtaaaatttttgcttttccttaaaattataacaaatatttaataaattaattcatcaaagtttcagggcaagatcagtatggaaaaatcactggtgtttctgtaaaccaacaatgaacaacccataaaggaaactaaaaaaaaattccatatataataacatctaagagaataaaatatgtaggaataaatttaaccaggaaggggaaaaactcctaaactgaaaactacacaacattgtcaaaagaaattaaagatctaaataaattgaaagatatccatgtctgtggattggaagacttaataatgttaagatggcaatactatctgagcgtctacagattcaatgcaatctttatcaaatttccactggtcttttttgcagaaatgaaaaatctgatcctcaaattcatatggaattgccagggggcctgaatagcaccagtaatcttgaaaaataacaggctggaggactcacacttcccaatttccataaagcaacagtagtcaaaacaatgtggtactggcataaggatagacatatagaccaatggaatagaattgagagtgtagaaataaaccaatacatctatggccagttgattttatataggggtgtcaagaccattcagtggggaaagaacagcaggctgtgtggatattgagagcagagtattctaaaggaagggaacagccattgcaaagactctggggcagaaacgtgcctggagtagctggagtggtatgaacaaggggaataggagatgatgacgtcagagaggtaaaaaaggacgtgggactggggagagcaagactacatagcatggggccgttgttccttatctgagtgagaaggagagctctagagggttgtgagcagagcttatattttagcaggataattctggccctggggtgagaatggaccttagcaaaggtggaggcagggaggccaagaggccagggaggagactgctgcagtcatccagggcaaagagggtgatggctcaaggtggagctgatggtatttttggacacatttcgtgtaggatgtgagaggaagagaggggtcaagggtgacaccttggtttctggcctgagcaaccagaaggatggagtggccattagctgaggtggagaagactgtgggaggggtaggttctctcttaaatgtgttaagttgtttgaggtatcaattaacatccaaagggaaggacaaataacagtgggctatatgagtcagcatttcaggggaaggtctggctcggtggtaagaactggagctcagcagcatacagatggtccataatgccatgagtctggatgagagcaccagggagtgagtgtgtttagaggagggtataagatctgagctctgggaatgtcatcatcaatagattaaggagaagaatgggaaccaacaaaggacatacagaatggcctgtgatgttggccatggacagaagaaatggcctgtgatgttgaaggaccaatatctctggtgtcccagaagccaagtgaagaagtttgttcccagggaggaggatgaactaattatatcaaattccactgataaggtcaagatgaaggccagatgaagactgagcattggccactggatttaggaagatggaggtcattgatgaccttcccaagcagttttggtggaagtgggatgaaaacatgattggagtgggtttaagaaagaacgagtggaaatgaagaggtaactctttgcagatttcctgtaagattttactaatatttttaattggcaaagctcttacgacttagcatctctttctatattttcatgaggatgccagtggtagagagaaaattaggcaccatggaacggccaattctactgtaggaaaatgctgggtttggagtcacaagaccagggtctgaatcacaaccaggacctactagctatgtgacacctctactctctaagctcaatgtccctcatctgcaaaatgaagataataatcacttctctacagaacacatatgaactaaatggagaaggtacatggacatgctgggctcagtgcctggcacatagtaggtactcaggacaagttgtttagtgttcagtgtcatgcatgtaggatttgattgcattcagaagaggcatgttcatgtttgcgtgcttagttatttttaagtgtgctaattgcctctttaagtgaattgtcataattgtgtgattccaatattttgatacagcatatgcttattttttcaaaaggcttctggtcaattgggccggttccagtggattgaagttttgttttttgactgaaaggaatggacttgagcagtcagttagcattcactgggcaccttctctgtgccagcacctgctctgtgccagcacctattttaacagtgctgagggacagggagggaggtgtcggtcaaaacacatgaacagcaggtggctgaggggcgtgtagtatgctgggaaggagagctgtggtttgaaactagagcctgggacattcccccatttcccgtgcccatttattgtgttgtaatgagtcattactgtgcactgtgctaggcactgaggacaagagagttaaaggacttccccaaagacacagaataagtaaacagcagctcactggctcaggatcctcatttatgagtgttcctaactcacacagcacaggtctgagcaccacagggtgatgtgtgtcttcagcctgaccaccaagatgggctgggggccgattgcctttaggtggcaataagccacagatatcatatcaccccagaaagtagagtcccactgccagctttccagttcagagtcgccacctccaggaagccttcccaacccctctgcccattctaaggcaagactctactcctttgatgctccctatacaattccttgtgtgtgtcccccatagtatcataatattcatgaccacctgcaaccattttgactctacttaccttttgcttgtgtccctgtcccccatatcccagtgtgctactgtttgcttattctgtgtccttggggaagtccccaccatctctgaaactccagatgagggcagcaaggatagcaataactaacgctgacatcactcactgtgtgctcaacattgccctgagaaacttacatgttattgattcatttattctttatagcagccctgtagatacatactgtcattacctgctttctcacacatgaggaaactgaggcacagagagggtgttttagtctgttttgcattgctataaaggaatacttgagactagatcttttacaaagaaaagaggtttaattggctcatggttctgcaggctgtatcagcatggcacccacatctgctcagcttttgatgaggcctcaggaagcttttactcctgggagaaggtgaaggggggagcaggcatgtcacacggcaggagaatgagagagagagaggggaagaggtgccagtctctttaaacaaccagctcttgcatgaatgaatagagcaaaaactcactcattaccacagggagggtcccaagccactactgaaagatctgccccatgacccaaacacttttggctcagccccacctccaacagtgggtcacttttcaacatgagatttggaggggacaaatatccaaactgtatcagagggtaagtaatgcacccagagtcacacacaggcagtaagtggcagagccaggatgcaaacccaagctgcctggctcctaaccactgcactgcactgcctcctgcgtgatagggacagtagttcccagctccagggcaatcatgaaggttgagtgagatgcatgtttatggtgtccaccccaggacctggctgtacattcaactttttttttttttttttttttaagatgaggtctccctctgtcacccaggctggagtgcagtggcacaatcacagctcacttcagccttgacatcctgggctcaaatgatcctccacctcagcccccgaagtagctgggactacaggtgcatggccacacacccagtgaatttttgtatttttttttgtagagatggggtttcaccatgttgcccagagtggtctcaaactcctgggctcaagcgatcctcccgtcttggcctcccaaagtgctgggattataggccaactcattgtttctgagctcttactttgtgttccaactctgtgccaggtcctgactgaggcattggggatatagggagcaaaactcatgttaaatatcagacaaataatcacacaagaagtcagttaactacttataacgatgagtgcttccaaggaaaaattctgggcaatcttggggtgtgaaatggggtttgatctaccctggagtatcagggaagacatttaaacaaaacctattgtggagagatgagtaggaactaaccacgggagggacagtgtgtggcaggcggagtgcagcagagggaactgtgtaggggagagcccagaggcaggagaggtcactgtggttagaggggtggtggggccaggccatacaaggacttccagggctggatctgggactgtggacttcatcctgaaggcagtggggagctcatcatttgatgtgggattgacatcgtgtgatgatcatcttgacagagaccagtctggctacagaaagagaatagagcagcccgagtggccaatgaaaacggctggtaagaggtggtggtggcctggactaggatagtggcagtgggaaagaaacagattttaaagatattttggagacatttcattggatttgagagatgtcagggggtgagtcccaggttcgtggttctatgaacgggatggaaggtagtgtcacttgctgagatgtagaggacacagggacacggcaggggaaggggtattatgatcaacaaacgagaacattgactgggcatcgagaggctccgccctggagctcagatgagtgaccaaggctggaggggtaaatgtggcacttagatgagaatcgaaacccagactggttgaggtccacctggggaggcaatgtagggcaggaagagaggggagttcaggacagcctgaggaaccctagatgagaacagagaaggagaaggtgaagcaggaaggtggacatggtcatggcctgttcccagatgactgtttgcccatctatgagatcatcccactgcagccctgcagagggaggaaatgagcaaggggccatgtgggctctgggtcccagtggtgggtcccagggtggcaaggcacttaccctctcagtctgttctacgactgtaaagggtagtctagggctctcccccatggaatttaggtatcttgtgctttctgctgttgccacaggctgtacacacacccagctatccccgctgctcagtaacttcatccagcagacactcagggaattggccaccaccaaccaggtcctgtgccaggctcagtgaccttcactattttaacacacgcacttaaacaatacaatgatgctagaaggtgttatttcttacatgctattgtggtttaggtttccccccacctctatgcatatttcttgattgatttaagatttagcactgtaggtaacaatatatgttacgtagttatatagtctgaaagagctagaaggaagatattgaatgttcccaacacaaatgataaatgttcaagatgctggatatgccaattaccctgatctgatcgttatgcattatttgtatcaaaacatcactgtgtaccccataagtaagtaccattattttatgtccatttaaaaaatgaaagaaaaagtgtagaaaacatttacctttatatttaccaatgcctttgatatgcttcctctgttctggaacattctcaactattatctcctcagttctcccctgacctattattctctcactcttctccttccagaatgctgattgaacaggcatccattagacactcttactctgtccgctgtgcacataaactctctttcatatttcctttttgaccgtctatgccaaactctggataatttcttcagagtcatcttccagttgacacacctcttttctgctaggtctaatctgttccagagtgtagaaatggaagaatgactcctcaagctaaagtaaccttgttactaaaaccccaacaaagacagtatgagacaggaaaattataggccagtcacacttgtgaacctgatacaaaagtcctaaacaaaacatcagccaacaaaacccaacaatctatagaaagaataatatgtcatgaccaaatagggtttattccaggaatgcaagattgatctaccattagaaaaccaaattacatgtttactatgctaactgaattaaaggagaaaggtcatttgagcctgtcagtggatgcagggggaaagaatttgatacaattgaaaagccatgcatgattttaataaagccacacactttgacccaccaggaggtccctcagcttgcttaagaatacctcaaagaacctgtggcaaatggcatcctttgtggtgaaatattgagctctttaagataaggaaaaaggcccggatgtctgttctcaccatttctattcagcgttgtcctggaggttcctggacagtttggcgaggtgggaaaaaaaaaacaaggaaggactggaaaggaaggtgcacaggtgactcctggtttctagcttgcactcctgcaaggatgtttgtgccatttaccaagatgagaaagactgagaagccttgggctgagtgttgggagcacaagagaaaatggcctggcttccctggaaagatcaccaggcctggaatcaggatacttcagctccattcccaactcttcccccagccatggatggactgctttcctccctggacctgagtctctatctgtgaaatgggtgggcaggaaagatggatccaaggtggactgtgatggccagatctggtgggaaaccagagaggaacagggggagccggcccccattctccaggagggcaggcttctgtgtgcagagcctctggtgggaggaaacatctgtttggggatagggcaggagtctgaccgagttagggcaccgtcttgaccctctgccttgcagaaacatcatcccttctctcctttgccaaggggttgctatcgttattattgttgctgttattggtgctgttgggtatgttctgcggttgtaaggcactgacccccaccgacatgtctttttgatgttttagacctacaacggccagagcgagaacaacgaagactatgagatccccccgataacacctcccaacctcccggagccatccctcctgcacctgggggaccacgaagccagctaccactcgctgtgccacggcctcacccccaacggtctgctccctgcctactcctatcaggccatggacctcccagccatcatggtgtccaacatgctagcacaggacagccacctgctgtcgggccagctgcccacggtgagtccctatcgcctgctgcagttcctgctgatgacagcagggagggggttgagagggaagcagaagaatgttgatgctttgataagaactctctgctcatgggcagggtctgggtttacctggttgcttggagttggtaatcccatgctgggattacctggtagcatgggagtctgtgggacacggtgggtgggcatggagagaaatctaatatcagcacactgcttccttctggagctctgcgtacagtatctcggtattggtttgcattatttgttaatagtataatctcatttttattttttaacagttttattgaggtataatttatattccatacaattcacccatttaaagtatactacttaatgacttttcatatattgacagagttgtgtgaccattaacacgattgattttagaacatttcatcaccccataaagaaacactagctaggcacagtgttgtgtacctataatctcagctacttgggaggctaaatgggaggatcgcttgagcccaggagtcctgggctgtagtgccctatgcaaatcagttggctgcactagctttggcatcagtatggtgacctcctgggagaggggaaccactaggttgcttaaggaggggtaaactggccacggtcggaaacagagcaggtcaaaactcccatgctaaccagtagtgggattgtgcctgtgaaaaggcactgcactccgggcatcatggcaagaccctatcacgaaaagaaaagaaaaatgctctgttgccgggcatggtggctcacgcctataaccccagcactttgggagactgaggcaggaggatcacttgagtctaggagttcaagaccagccttggcaacatagcaagaccccgtctctacaaaacaaattagccaggtgtggtggcatgtacctgtagtcctagctacttaggaggctgaggtgggaggatcactcaagcccgggaggtcaaggctgtggtgacagagtgagaccctttctcaaaaaaacaacaggaagaaacatcatatttttggccatcactcccaatccaccccctgaaatcttcagccctaggcaaccactaattgactttctgtctctataaatttgtctgttctggacatttcatagaaatggagtcatataattaaaaaaaaattgtatcttgcttaagctgccagagaagagggtgattactgagttaaagttcatgggataggtaaaaatgtagcaggcagacaaaggcaagaaagaacctttcccaggttgggggaatatcaggtacaaaaggaggtggcaagggtgctcgtgccatgcttgggaatagcatgtggttcatgctttttattgggctggagaggaaggacctggagccaaggagagagaggagatgaaagagctcagcagggcctggatcataagggtcctgaatcccattctaaggagatatatatccttagaatggctgatttgaggccaggcatggtggctcacagctctaatcccagcactttgggaggctgaggcgggggatcacttgaggccaggagttcaagaccatcctggtcaacatggtgaaattctgtctctactaaaaatacaaaaattagccaggcatagtggcacacacctgtaataccagctactcagaaggttgaggcacgagaattgcttgaacctgggaggtaaaggttgcagtaagctgagatggtgccactgcactccagcctgggccacgcagcaagaccctgtctcaaaaaaaaaaaaataataatggctgatctgaaccatcaaaatctatagaaaaatggtagaacagtagagcattttttttataccacagaaaaatctccttaagggaattctattgcttcttctgaacaactgtgacttgtgtttatttttgctttttttcccttcacatttaatattacgtactagtcatgactcttacgttcatttttaagtgacagggaccaaactcaaacttatacaaaagagtatgaaatatccagggggtggatacagggtttcaggcatggttcaatccaggaaccccaccagtgtcacaaggcccatttccacacaacaggcttgatggctgctggcagccagcatcttccctgacatctctggcagagaggatgatgacagcatcgctggacagaccactatgtctaggaggaagcagttcactattttgtcagcttgagtcacacatacacctgtggcacaggaggaggcctgcttagttgattttcctagcagaatctcatggtttggggtggcttgtgtctacctctgccatgactgttcagaagccacagtcgaatttgtggcccaattctagcagacccctgggaccttaggacacggctttatagtcaaacgatctcaactgtattttgtttactcttcatttattaccaccaaacttccttgttcaaaaaagcggtgtcctctgtgtatttttataaggcacgtcacatttttttgtttgtttttgaagctaggtgggaaataaaaggagacaagaaagggaaggagggtgggaggaaaccaactcgagatccacatttcatagtgtttggttctcacgaaagagttcaatgaaaatggatgctccgtttctccagaaattttttcctcgtgggtccatcaataatgcaagtcctcagcttcctcttctctctctcaaacctagcgattcagactcacactgccatgtctggaatggttttaacccatttatgcctgaggttgcaattttttgaatttttgctatcagaccttggcaatgagcttgagcagtaggatataaataactcccacatgcttagcgtttcagtaatggaacactaggcataaatgggtttccagttcgttagaatgcttgtaccgtacttgcttactgggctcattttctagcagaaacctcactgctccggaccatccctgtttgggatttatggtaatacaaacaagagcagggccaggtgggcactttgtcatctgctatgagggctgtggtgcaggggtgagcatggctacagtttggggccactgtgttgccgcctttggtactggggtgaatggagacagtgtggggtggtggttggtcccagacaccagaattagatcctggcttcacctttgaagcctcggtttccttgtcttggaatcataatcgtacccacctgaggattgtgatgaagtgtatcggagataatgtatgtaaagtcttagcaaatgtctggcagagagtaaacattcaatgagcacttgctattattatttgtaataaaaacgaatttgactgtaactgaatggcagtgttttcccttaagtctcatttacctaaaggagcagactgcagacgccctcaggtacatttgtagggccacctgattataatagctctgataattacaaagcatgttatctttttgtcaaagatggccccctaattgcccctcctaggaaatgcttttgttgggctctgtccaaataggcacttgcagtcgttttccagattttctttaaaagtagctcatgtttaagaggcttcacaaattcagatagccttaattcttccattagactttgcaagggttcactgaattttatatttcctctttatgtcatgaaagataagccaaactctattacccaggggagggcacccggaccaactgggaaaaccagataaggagatgtacatgcattgggactatctggtgaagagagacaagggactcttcaagacaagagtttttaaattcatctgaaccacaggacaaaggggcgtggctctgtgtgtgcgtgggcatacacgctacgtgggtgacgctggaattggtgttaacacctgctgggtttcaagcaccgtgcagagggctttcaaacgttttcttgcataatccccccaagaagcaaaccgagggataatgataatagtatcatgaagggatggagaccccaaggtggcagatgattatattagtgtctcatggctgttccaagagattgccaccaacttgggggcttaaaaaaacagagatttattctatcacacctccagaagtccagaagcagtctccttgggctgaaatcacggtgtcaggaggaactcactttccccagaggctgtcggggagaatccagcctcgcttctcctccggctcctgggggttgctggtcttccctggctcgtggctgcatcattctgatctctgcctccatcttcacatcgccttccctctgtcagcaaaactccctttgcccctcttctaaggacatttgtgatggcatttagggcatttggggataatctaggaaaatctcccatctcaagatccttaatcacatctgcaaagaccctcttttctaaatacagtaccatttacaggttccaaggattaggacctgatgtctttgggggacatttttcaacctaccacagtgatcctcagctgtgcgacagccttcattgagtgcccactaggtaccaggcattgttctaggcttgtgatctacaagatgcccttgagggactcctggtgcagatggagagaaggtgaaaagcctatttctaagactgtggtaaattctctaatagcatcagtgtgtggtgctctgtgcccggaagaggccccttagatgtggggttatcacttcctagaggaagtgtcccctgatgcagagtagattctataagtactttgtgaatgaattactgtcatgcagctcttaaacagcaaggccagaatgcaaacccagctctatcccctgccatccacctctcagttttaccagatggctgagggatggtgcggctgggctgcagggccacaggtggcacagaggatgcgctgatggccagggtgcttcaggcgttgtctgcacagatcgagatacactgaggatgtcatccctggagaggcgggcaaggccaaggcatttgacagccatctcataaatgccaaagcccccttggctctgatcccagaggccaccaattctttccggtcccctgccctggcctgttcagccttgcaggcgtgggtgggagttagctttctgctttgaaggtatggcagctagcaggagtcatgtacagtattggaatcgaaccccttttacaaaattaaatatgcttaaggcttctctctcaacttcagcgtcttaactgattaaacatttatttccaagacaaaaagagtcaatttagtatgaaagatatattttgccggtttaatttaaagtgctgcacctctgtctgaccctgattttcataactcaataattttatcctgtgttgattgtctcatttcgagagagatattgtatgtataaatcagtttctaaaatacccaaagaaactcgaagagtggaatttattaagctgcttctgttaagtctgaaatcatttattttggagtcgtccttgggaaatgtttgagcttatgctcctggcttacccaggagaggaattaccctgggagatgacagagttggacattcccagacaggttcctggggaacctgcatcttttgtgagaccagagaaactcctgggagagcctcgggcagatggaggctgggcccagccagaaatgaattctggcaaagctcccccgacagtagctatagattctgctgatcagggaaatgtgggtttttcctgcaccaagccctgtgggtccctggagttgtgtggtcttgctgtgggactcacttagtgcaggagaggtatgcagtgtcattcatgcattctcctcccagctttgactcctgtttgctatctttgggatcttggacaagttacttctctcccagcctcagttttcctatctatgaaatggggattgggatttcagctctggtgaactcacaaataggaaaatgggtagaattgttttgttagcagtgacatactagacaagtatatggatctgaagttcaatagtcctcccactaccaacgtcacacatatcactggcctaagggggctcaaatactatcaaatgcagtacttagtgctgcgtttcagattctttgtgttctaggtccccgtcccaaagcatcttgccaagataggcccttcatgctgcacacacagggctaggggctgtggcccagggtcccccaccccaagtgaagggcctttccatgctggtgccctggactaggctgttggggaaggggctgagctgtaccttagttgccacttgaccaccttgctttagagatggttcctgtgcccggagcctgggggcaggatttaaaacttggagtggggacttgatcctgggggcagggccttggacttagggacaagttctgggtattgactctgggaggtccttgatataccttggagtggggacttgatcctgggggcaagggccttggagttagggacagggtctgggtattgactctgggaggtgcttgatatacctcctaacacctcccccattttcttcctgttctgaactattcccctccaatctcctttctctctcctcttctcttccctaccactttcctcctccctgcagaaggcatggtctatccctgttggattctcacaagttgagacataggaataccctcccaagttgcagacacaaggaagaaagaccctcaacccttggtcctctggtcttctgaaacacagggggcagtagggaccccctagtccaacccattcatttcattactcttaatgcataacatttttggtttggtcttgtcttatgaatgtatcaattagcttttgctgtgtaacaaactaccccaatacctagtggcttaaaacaatgaattcttatgatttctcattatttggcaggtcagcgaggtagttgttttgatctggactgattcaggtgatttctgaggtccagcttaaagcctgcctgcagctgcttattctaggatggccttattgacattgcagtgcttggcccagggtcagctgacaccaaaggggaatgatttggccactctcatatctcgtgatgagaggtgtatgtctcaaggctgggcatcgtggctcgcctgtcatatcagtacttcgggaggccaagatgggcagatcacttgaggtcaggagttcaagaccagcctggccaacatagtgaaaccccatctctactaaaaatacaaaaattagctgggcatagtggcttgcgcctgtggtcctagctactcgggaagctgaagcaagagaatcacttggacccgggaagccaaggttgcagtgagccaagatcatgccacttgcactccagcgtgggtgacagagtgagactatctcaaaaaaaaaaaaaaaaaaaaaaaaaaaggaaaagagagatgtgtgtctctcatcacatggtggcctaggatcattcacatggtgatggacacagggtgcaagagagggtacaccccaatgtgcagtacttttcaaacctctgcacgcatcctatttgccctagcccattggccaaagcctgtcatgtggcaaatcccagagtaaggggtggagaaatagatcctacctcttgaagagagaaatggtagagtcgcatcatatgagggtgtgcacgcagagaggcaagaatgtgtagctaactttgtaacctaccatgatgacattttgggttttctctgtgcatttttggtttcttggcatacagtatcatctagtagtcaggtgtataggctatgtggtcaggctgacctaagttcaaaccccagctcccctccttgttacccccaaccctgtgacccagatcaaggggttgatcctccctgagcctcagtttcttcatctgtaaatggagatattgttacctgcctcataggagtttataaagagtcagcgatccgatgcaggtgaagtgtcacgcataggcaattggtaaatgtaagctgctctgtttattactttaaccactttattgacggggttggggtggcttcagcctcgtctctaagtttgtccgggctgacctgctgcttaccaactttgtcgggggctgaggtggccagggatagtgggagggccccagctgggggacaggcaggggaaggcatattagttacacttaggacctcggtcagggctcagagcttaaaagcaacagcggagtgacagttccactgcttgccaagaaagcgggggcccaagacgcaatgcttcttggcatcgtgaccaagggaaggatccatcttagtcgaagcagggggttaccaggggcacctccgagttgggcttttccaaggtgccatgcttttgtctaacgtccctctggggatggaagtagggggagcactgatctcccaaatgggtctctgagggtcctaaacagtggtaactagaggccctgggcttcctttgtatttaccagagtccagatgaaactcctggcccctgtttttcagaggcattaagcaaaagaaatatgtctttttacattttataaaactcagaaaaatggctttaaacagcttttgctctcctgctataattatttattttcaaacactcctgcaggggaccgctccgttttcttaccctgaactcctttttctcataaatgaaccatcacttcaataaatcattatggaaacagagactaacaccggctctgaaaggttgaaagatttatgtaacacatttatgtttcccattttctcattctggtactcggctgcaaaagctaagctaataaaagctgctattaatatttcttgttgcctagcaaccccagagcgggagtaatagcttcggctagaaaaatagatgaccgataaggaaaaattcaattcttttattatctcagggggaaatggccttttactggaacattatgatgtacgagtgtgaagttgaacacaaaagatttttttgtatgtgtttgtttttctgtttttaatgaacattattttacctccactaactcttttagggcacttttacttttctttcgtaaaccccccatcccatccctcatgcttaatttagcagctacagtagttaagaatctgtcggcgttctttagtttaaaaatggtttttgcaaaggtttacaactcggtcataaaaattcactccctgttaaaactcaggccagtgataagctaacacgcaggctggttttctgtgaacaggatcacgtttgttgacgagataagattcatggttttccctacaagaaaggtcggaaaggaacaaaacatgttcttttccatgtcccagttttctttggaaccagggacactgtctcttttgagaaccgtttgctctgcagtttgggatgcgttcacactgggagaggatggggcacagatattcactgagcacctgctctgcagagccttggtgccgttcccttctcccagcaccctttaaggtaggaaccattagggtgcctatttttcagatgcagaaactgaggcttagagaggccaagggatcaggctgaggtagcatcttttttatttttagtagagacaggatttcaccatgttgcccaagctggtctcgaactcctgagctcatgcaatctgcctgcctcagcctcccaaagtgccaggattacagacgtgagccactatgcctggcctgaagtagcatcttaaaccatggtgtttcccacctgtgttctttagcgcaggggttcccaacctcggcaccactgacattttgggtgggatgattctctgttattgggggtgtcctgtgccttgtaggatgtctagcagcattcctggcctctactcactattcctggcctctagtagcactaccctagtcaaaataaaaacgaaaaatgtctctagaccttgccaaacatcccctgggagcaaaatcacccctggttgagagcctccgcctgctgttcgctctgctgagaaggctgttccaccttgtccacccagtgaactcctattcctgtatgaggacccagttcagaagttatcttctcacagaggctgcctggatgctctgggctggaacgagggtgaggcatgtgagatgcgtgcctcaaccataaaatttaaaggtgtgtccaaaaagtcatcaagataaaaatagtgttttaacgaaatattttgaaaaggcaagattaacacagaaaaccatgatgaacaacatatcagaaatgtaaattaaggtgggatcagtctgaattcatggcaatatgtggttgtgcatttaccaggggccaccagcctgggatggcctgaaggctgggcctgggccttgtgtctttctctggccccagaatctagcaaagggcctggttagcaggtgaccttcaatgtctgtttattaattactgaatgaatgggagaagggaattacttgtccagggtcacatagccagaaaaaggatagagctgggacttgaacctgggcctctgactctaagcccagttcttcctgcacccgcctggctgagtatgagtatggggtgaatctttgttgtccgctgagtagggacctaagctgtggacgattgaaagatgctctggggtgctcaccgtctaggagtggcgggcagggaacagtggccgtgatttcagcttggtgtcaacccggctttccctggggctgttatttcggcttcaccacctctgtgccaggcgagagctgacgtgggcagctcagtgacatgtggagcatccccaagaacatcacgatggccagccccttgcagcactgctcatgcccatggggccagatgcttcaccttggcctttggaggtcaagaaccacaccttatttgaccttgtatcctctcagtgaacttttcctaaaggaatgggtgaattatttataactgtcatgtaacatttatttagcagttactatggaactggcacctacttaaaccctttctatttataatctcacttaatccttgaccctgagaaggaggtactgttattgttgccattttacagatgagaaaacagaggcacagaggggtaaatgacttggctacacagttatcaaaatgatggtgccaggaattgaacccaggcagcccgactccccagcctgggctctccatatctagcccatgtagccttccaaaatgaatgagtgaatgagcaaggcagtgagcgggacaagatggagacccactttatctgcccagctctgagttgagctattcatattcataaataatctcaacatgaagtgtgaggcacttgcagcttggaacaagaaatggaagaagtgctgagctcaggggactgtcccggcaccgaaggcttcctggagggggtagccttgggggccagaggacagtgggaaagcctgagaggaagaaatttcatatgtgcatggacctccctgttcagacctgatcaccaccccttccgctgaaattcataaaacaatttgtgatgttttatggttgctcagctgccctctggtacccaccctttccatcccctgctgggctcctaatcagagcactcgaggctgagtgcaagggccaggtgtttaacttccactccaggcagcatgccaagcctaacagggtatgaactctgagagctgctcctgagtcatgagggagaattaagggaaaatcgcagcgacattcgtcagctgcagcctcgatattactgggtgtaatggctctttcctccgagtgcatattcaggaccatgtttgggaaaatgagcttttaatgtaccgtcggcattgctgagaagccatctttggctccgcagaatgtctggagcacataaaacttgagatttattggagtcattttccccctgctctgcctggataataaaaagtcagtctcatgagctctctttctctcatcttgtggctttgtccatttagaactcggagcctttataaaaggcagcaagacaaatacagctcatctaaatattaaagctccaggagagagtgtcgggggactatggaagactggaggctgggagcgtttccaggacaagcgcgccccatcagagatttaagctcagcagctgtgttgggctggggcccgggctatggtggtggcagctgcttgcccaagcagtagcacttaactgggagtctggggtcctgggtgcctgttctaccccagtgggtgaccttgggtgaattactgtctctctcagagcctcaagtaagatggagctgatgctgtctactccacagagtgtgggaatcaaacgtgccaatgaatatttctgatgctttgcttcatgtgtggcatgtagcaggtgtctgaaaaaggtttgttgactgactgactgactgactgactgactgaaaaatgaatgaatgaatgaatgaatgaaaaataaatgcctctgtaaacacctcaaacatcatttttggagactaagttacatggggaccctatagcatcttctgtcttacacagcagtctgcttcatatcttctaaccctcctgttgactttaagggagatagaattctgctcatttacagatgtgttcccaagacctaaagggaaggtggcttgtccaaagacacacagctaggaagtggtgaagacaggatgggaccctgattcttttgaccccaagtgctttatgtcctcaacacaaaaacatccctcaccctatccttggcccaggcctctgagctgggatggtgggcaaaggtgggacccttgcccctgtctccctatcgagtgtgggtgttggtcaaagctctcagctgagacagggttaggagggcaaaagtgttggtttaatggctctgtctccaaactcctggtagcaaggaaaaagggaaggaatatcaggtgagtagtcagaacctgtcatagggtgtgtgtgttgggcagagctgtgggactgggatgctggagccctgaggaatctctaactaactaactaagcatggttagttcttcctgtcatcccggaaactgataacaagaccgcgagtcaggaagcctgggtttaacttcctgtctctgccaccactaagagattgtgggagacaagtcactttccttccggcctcactttcttcacctgttgaatggacaaaacctaaatcaccccagggagttgtggaaaggatcaagggagagggggcttctaaagcatttcatgaatgagctcctcaagagattcaagtctctggagggtgtggatcacagccggctcaggagagccccgggattaggaggtagggctccaaggtcaggcagcatcagctgcacatgtaaccagctgtgcgacctcagccaagctgtttaacctctctgtgccacagtttcctcccagggttgttgtgaagagtaaatgagacattagagatgctatctggagccgcgctagagggaggtctgcctggtcccacaggcagcactgcagcgtggattaggccacggagttgctggcatttgttccccagtgtgaactgtgaatcagtcatgggtcacaggccagaagtaggtggagctcctgcataacttcctacgtaagacggccccccaagggagggagagcattaggacaaatacctaatgcatgcggggctcaaaacctagatgacaggttgataggtgcagcaaaccaccatggcacatgtatacctatgtaacaaacctgcacgttctgcacatataacccggaacttaaagtaaaattaaaaataaaaataaaaataaaaagatggcccctcttggccaagggcagttctcgagaaaggggcaggtgtgtgcctttggcagccacactcccagcaggggatccagcaagacagactactgctgagctgcttctggaaacgtgatcctaaggccagcagcagcagcattgcctggggacctgttagagatgcagattctcaggcccctccctagacctggtgactgggagactcggctgggcccagcagcccatgcctaaccacgcctccaggggcttctaatgccagcccagaacactaggctgtggtcatcctcagttgagccctgaattctcagttgttttaggacacataggatgcacttgtgtttctgtttgccttgaggatttcatcacactgaggatggttgcagactttttccccccagaggaactcgaggaccgacacctctgcctgtggttcctggttctttcctaccctgtgcacctcccattgggacaggccttgaagcggaccctctggcatgatgacagtcccagcctgtgatcagaaagactctaggttttcctgaatcgcacgacgcctcatcctggggtgcttcatgggcaattgtgcaccaagggcctaagaagaaccaggaacaaaatgcaacagggaaaagaaagggggcctaggacaggggaggtatcagggacgtcttgtgaccagaacgcaaaattcctcccactgcttatgggggagaggggtgtgcatatgccggggaagggatggatcagcaaagcccattctttgagatcataggaggacagagtgtgagcaggtagacagactcagacatttgcagcactggtagcaactggcccgggagaactggaccttcgtcagaagcacagggtaacagcaaattatggggccgtaagccgagattctaagactgaaggatcagcctgagatggtcgctaccccatcccacaggactcctcttctcctttgggagccccagacctgaggcccctgtccctgtgcacacaagacccccaaccactccctttttgtctgccttgtgaacttgacaccttcttaccttctgcttctgtatccctcctctgagaagcagattaactctagccagtacattggctgtgccctgcatgcttccactaggtcgacttttttttgagaaagagtcttgctctgttgcccaggctggagtgcagcggtgcaatcatggctccctgcagcctctaccttcctgattcaagcaatcctcctgcctcagcctcctgagtagctgggatcacagacacacaccaccatgtctggctaatttttgatttttttttttttttaagagatggggtttccctgtgttgcccaggcttgtcttgtactcctggcctcaagtgatcctcccactttggcctcccaaagtgttgggattataggtgtgagccaccacacccagcctaactgactttgatcacactaaaccagaactgtaccttcccataacccactgcaaaatgaattccagatgtggtagggagcaggctcactttgcccttagcacgtggcggaaggcccgtcacccacacatgcgtccacagcacaagtgagcaatggccggccgatgacgctggagacaaaactgtccttcgggaacagccccttaaccgggactctccttgtcttctctgtgcccatggccctgctgagaggggggtcagcacattgccagaattaatgtcactggccttggacttggagagaactggattttgagtttctccagctacatgcgtgttgaggaagttacccaggccctctgaactttagtgtttttttttgtgtgtgtaaaatagatgtattattcattcttaccttgtgggttgctttgaaaatcagatgctgtcatgattataaagtactcagcatgggagccatggcaatgctattatttgtctctaagcactttacgtgtgagctgtctctttttcttccctgccaaccacatagagggctctgtatcctttctggttcccccaggaagtccaccttcccaagcattggtgaactgacagtggatacccacatggtctcacaggggtacctggcacaaacagtttactcatttttgcagttccatgccttattgtggccacagtcactgtgagcctgtgagtgtatccctgccctgtggcatgttccatgcctggttcttctctcggttctgtctgtcacactgtgagcccctcagccctggcatctcccctatacttacctctgtgcccatgaaaccaaagctcctccatgggcaggacctgccttcgttagaaattagcttagtgacccctgagtggggtgtccttgggatccaccctccaccccaagcaggtcctcagtgtgtttctatcaaacaggtacaatttttctcccagagacagattctagttgtacattagttggagtctaccaagaaacaggcaccagacgggattagatatgtaagaggagagagagagggaaagggaggtggggggaggaagagaaggccagaggaggggggaagcttcagaccatgatataggtctgaaaccagagggaaaaaggatgggaaggagggaggaaagggaagaaagaaggaaggaagtgaggtaggagggaaagatagaggaaggaagggacagaagggaaggaaggaagggatcccagcactttgggaggccgaggcgagcagatcacctgaggtcaggagttcaaggccagcctggccaacatggtgaaaccctgcctctactaaaacaacaaaaatttagctggatgtggtggtgaacacctgtaatcccagctacttgggaggctgaggcaggagaattacttgaacttgggaggcagagtttgcaatgagccaagatcgcaccactgcattccagtctgggtgacagagctagactttatctcagaaaaaaaaaaaaaaaaaaaaaggagggaaagaaggactgactggataggaagatctgggtagcaaggactggacaggaagcatcttggactgcatcagttttaagaaagattggccaggccaatggggagtcctcaaaccaaagctgcccatcagaagagctgcacaccttccccaaatggacctgccttaagcaccaatgtgttcagacactgactgggcgtgaccacaggccagcgtggcctgggaggcgcatgctcagggagccgaggagctgcagctggtgctctcagcatcagtgccacctggcacagaaggtctgagtcccacattttggtggccagcacagtccatcccttttgccacacagctctgcttctcatgcaggacagtgagcagcacctccacgtcccgtgggccctcacttctgcagggaaacttaacaaatgacaacctcattgctgcctctggtcttggggctgccaccagcactcacccccttccctccttcctcagccacatcccctctcccttagcccgtcccctctctgatccggtggtggctttttataagatagctttatcatacttctgtattgaggttccactatctttataagatgactattacactgagttctcctgagtaatctactacactgagatctcatacttctgtattgaggttataccatcttcctaagatgattattacattgagctctatacggttattaccatggagttgtatatagtattaccttatctcttttatggtcttcgtatctataattacaccctgattcataatgctaaagtcatatattggtggtttctccctctcttttctgttcacctttacccagggtttatccatcttattgctttatctacattgttttattcattttattcagaggactaagcatcagagttgtgttccaattctcttacttttctttctcttaatgttttccctctttatgaatcccttctttctttttgtagatgtttacattttttattttgaattctttagttcatttacttttattgtttattgtttaataataaaaagtttatggctgtacattttttcttagtatggctttggctgcatctataaattttgaaatgaagtcttcttacatcttttactttcttcccaaagcatagctttgtggatttgatttttaaaaaatggcacatgttcactgtgaaaaaaaaattaaaccaacaaatacaaagaagtaaaaattgttaaaactgcaccatccacaaataatcattattaacccaaccatttactaagtatcttttcagtcttatctttgtgcattatacacaaagataatatatacaataatatatacaatatacaaagatatacaatatacaaagataatatacacaatatataaaaatatgtacaaaatttacatacatgggacccgaatgtgatgccttttcctgtactttccagtgtgttctattggagcagttctaggacctgccaattttctgcaacagtgtatcatgtgtatacttccacgtgcataattacaggtcttgctcttccttttagtggctagataacattccatcatatgggtgtttcatcatgtacttaaccttctgttgatggacatttaggctatttctgatcttttctattataaactctcttgggatgggttctttgggagtggtgaaaaggattttttaaaaaattttattattattatattttgagggtgggatctcaggagagggagggagagatgttaaggcagacagagaagtttcccttggatgcgtcgagcctctgcctgcccccaggggtgttctggagcataaattgcaccacacagttgatcccatcatagggtaaaggggtagcctttgcacccccatgtccattcgtcgttggccagagattgggggatggagtgacctcctggggctgcagtacctgttggcaagtggtgtcctctgaagaagggggcagctgagagccttcaccaaccgatgttcccagcagctgggggacaggttgctgctccagtgaagggggcccaggaaggggccaagaacttctgctatatctgtggttcttaacaggcgcggttttgcctccctgcagacatttgacagtgtctggagacatttttgattgtcacaactggaggctaaggatgctgctaagcatcccgtaatgtacaggacagagcccccaacccctgccaccaaaaattatctggccccatatatcattgatgccaaggctgtgagaccctgcactacaaacacagtcaaacatttttgtggacttaccttttctatttgtacatttatctcctttgggatttcaaaacttcttgaaacagtcatgtgtcttcatttttcccaaattctgtcctcccaccctttcctggctttcgttttaagcccttcattgaaacttcccacttcgtggtttttaatgacctccatgttgctgaattctggggtcagtgctcagcccttgacttacttgcctgcgcatcaacctttgacacaattggtcactttctcagccttgcccagtgctttcctcacttggctgctgggacgcacactctcccgctcctctctgctccctccgtgtgagtctcctgagtttacctctgagcactgaaggggccccagggctcagtcctctttttatctatcgcaggtgctccatgatcccatctagttttgtggtttcacataccctctatatcctgagaacttccaaatttttatctccagccccaagtatctctgtggttgtctaacaggcatctgaaacatactctctccaaaaccaaggtcctaagacttcccctgccctgctcctccattgccctccgccccttcccatctcaccaaaagacagctccatcctcccagttgctcaggccacacatctaggggtcatcatcccggaccacccttcttctcagtgagagagctctaggtgaggacctggttcacagcctcccagtgccttcacatctccctcaaagtgagagccagtgatttataatgtccaccagaccccgcataatctgcatgccaccccacccccacggcttactcggctccagccctgccagcctcaccagtccttgaacgtgccacggacgagcctgcctcggctctttgccattccgttccttctgcctgaaacacgcttccgcagacatctgcagagtatattctcatacctctgtctttcttaaaaagtgactcagatgtcattctcaggaggcccttctaaaattgcaccccatcccccacccagcaccttgagctcatcttccctgctctattttcctccctggcacttaccactgtctaaagcacgatatatttatttgtgtgtctgctgtcacctctgtctccttgactggaacgccagtgccctgagagcagggactgggtctgctttgttcactgctgtatcaccagaaccaaaatcagtgcctggtacataggaggcactcaacaattatttttaaataaaattggaatgagtggtgggccagaagacatgcacattttgaagcatattgccaggtaattttgattcggatgacatggtggtgatcgtgggagcattagtggttcgaggtcttttctactatttctcaggccctgtgctgagcgcttcctcatgcattatttaattctcatgaaaccttcgaggtagactctattgtcaccccattgtatggatgaggcagctgaggggatggagctgtgcagtgtgttctggagaaatgttcagaccaggtgggtctgcccagcatcactgcactgaatccctacacaccgcccagaaaatgggcgcatcagctgcacccccactcatggtgccagagatatcagagttctccccctcatgtcagcactgaattttgtagaactttttaaaaatctgaactaatcctatgtgtgaaaaatgttattttctcccctcccaccacatgtctggatccttgggaggaatgagttacagcttcccccactctcagaaagaacccagatcctcagtggaggagtaatttgatgccatcaggagagcagggaccttggggctggaagattccagctcaagccccagctctatcctgggcaatcttcttcaccctttcagcctcagctttctcatctgtaaaaaatggtaaccatcatagcgcctgcctcagaggagggatgtgaggataaatgaggagccatttgtggagccttccaaactgtttacaggttgagaggccctaaagctcctggcggggtggggtggggacacatagtcctctgacgtggccatggagtcctgggtagggggaactctgatctttaagccagcttggattctaagatggcctgttgccttgaacggctgtacctgattggtcaacatttggccattgcccaaaaggggctggggataatgacttctttccgcgtgattatagcagcacaattcacaattgcaaaatgtggaaccaacccaaatgcccatcgatcgagtggataaagaaactgtgatatatatatatatatatatatatatatatatatatatatatatacacacacacaatggaatactactcagccataaaaaggaatgaattaatggcatttgcagcaacctgggtgtgattggagactattattctaagtgaagtaactcaggaatggaaaaccaaacatcgtatattctcactcataagtgggagctaagctatgaggatgcaaagacataagaatgactcaatggactttggggactcagggagaaagggtgggaagagggggaaaaagaagataaacagcatattttgaactaaaaattactccttgatattaatagtgggcattcctcttaaattatggattaaaaaaaccctaggaatttgttttacctcaaaaataaaataaaccgtaataaacctaaaaagggggtgctggagagcaggaaatgtgtggcttcttctgcctccctgacactgtctcaggccagacctccccacacccccttcatcaattaaattgtggtaaattaggcggtaggaaccaccccagaactccaagtccttctgtgcctcaggtccactgtgtgacctcagggctggttctgaccctctctgggcctccttccttcttctgtggggtgaggccactgagccccatccctgagcacccacaactctcctgggaaaggatctgggaagcttttcctgccgcctcctccccaccttgggcatttcagtctcggcttaaccagccacttcaacacaggcaacacttttctcgagagttcataaaaacatgtaaacacgggtgaggatacaaaatattgagcggcgaggcagtaaaacacggcagtgtttgttgtgttaactgaatattcatgagctgactgtttaaattacagttcacaactgttgcagggcctgatgaataatttaaatgagggtggccaaagagatttcaacactgcattagcaaactgctcaggatcagcttcagagaatttataattagctcagaatagcctataataaattctttggaaagatggttttaattagcacatgtgccaattcagaatggagaatgttcagcgttcaggggagggggtgggtcaccctcccctccttcttatgtttccccgtcatgcggaggtcccaccacctgcctgggatccctgagccatgctgagcccacccggaacccaccaccaggcttcctgccttgagtctgtcccgcctccactgccccatcccagcttaggcctctccgccatagcctgtgcagctgcagaagcctctgacctggtctccctgcttctgtgtctcctgctccagttcatccccatgggggcagccagtgggaacttactggatgcagatctgattccatctctgccccatttggagatccttaattgaggaggcccagagagatgaagtggctggtcgagctcaaataggtcccagacaccagttgacttcagccagtgcctaggtgcttggggatgggtgaggcatcactggcagaaggaagtgcacaggcaaagatgaggaggcaggaatgttctgtgtgtcgggggccagtggggagcaggacaagcagaggcttggagaaagcaggggcccgaccatggcgtgcctcaaatgcttcgaggtggaggatgtaggagggaggtcccacttaggggatcatggaggctgccagtctggggcctagagctcccagcccacctggctcattcctcaacatgtgctgagtgcctgacaggtgccagacctcgggctgggcactggggaaacggctcagagcaaagcaccagccacggttccctctttcataaatggagcacacaaccagagccatgtacacactcagccgaaggtacgactaacagctgtgacaagttcaatggaaaaaataacagggtgtcaggagagagaatcagcagggatcctgatttaggtggggagccagggaaggcctcctgaaggcaagggcatttgaactgagtccaaaagtgagtaggggtgaaggaggccaactggtcccaggtggaaggggctgccccattcccagagggggtgctgtggctgggcaggggggtgagggggtctagtagagcccccagcagcagcctagggtggggctggactggttctgggagaggggcatctgtctatggggagctcattgctggaggagaaaataacctacttttctgctcccaaaccctcgctgcagcgcttagagctgcaaaccttgagcaagacattggagtttctctgcttcattccatcaggatcactcacgcactcattcagccctcacacttttattaagcccctactatgtaccaggcactcttccaagccctgagcagtgaacaaaactgatgacaatccctgattcctggagcttacattccagtgatacagacaaagacgcaaaggagtaagatgtgccctccctggcactcaggtgggggaggaaaggttccctgccagattctctgatgccccctcccagtcctggtgctgtgggcagggctctcagaccccttttgaaatagaaactgaagatcaaattcaggaatttggaggattcacagcttggacaggtcatttttagttatccacctgctgtgaccaagggcagccagttctgcctcctcagctctctcctgtccatgacatctgccccacgtgcctcttgaccctgcctttagcctcttgccctgagcacaggggaacctgctgggccatcccccactcacacaccactctggacccccagtgactgccagaccaagtcctcatccccttgtgatctgcccctcctggctccccaagcttcgtcccttccttggccacagtgaaccctggagtcctggcagccccctgacactcagggtcgccaccgcgctgatgctgaacagcaagcctcgccctccagctccgcttccatcacagcagttctgtggtttgtcattgtttttgaccagtggttccctctcaattcttcacaaagatacagaaagataagtcacaaagattagtcaaaacaagacggatattgctgtgctgacctgcttggtgataacaagcaccataccctttcaggcactctgtaaccgtgggtaagaggatgtggtgaggccagcccagcctgcaccatgcccctctgccctcaatagtgaaaagagctcaaactttggggtcagacagacctgggtttggatcctgatcctgctctgtgtgcgctgcagacagggagccatgaacctcacctcttggaggctccgtttgctcaactgtaaggtggaaacagcagcagcgacctcacagggttgttaaaagaaccacttgacccccaaaatgagaacatggcctgtgagtggcaaacccatgttccagtcacccgcttctgcagttaggatccccatggggaattgctgtgatgggaacacctgccctccacaatcgcactttctgctcagcatctaaatagaaagttgtcctgtgacacctgcttactgtctcctctctcccctcgtggtcccagcagagcttccaaaagggggtcattgactctggctgtctatatttcctcccctcccatttgccttgacctctgcctccctgtgactataaaactcctctggttaggggcactgatggccttcacgttgccaaacccattgggcacctgctgtctttatcatccttgactttgactgtattagaccaggctcctggtgtcctccacccctcaggccacccttttgcaccctcctttataggactctcccgatgctccacgctcatggctgggtaccacaagggagtccaggccatttccactgctctatcccctctcctaagcaccagaccatgcaatcggcccccacctggaaacccccacttggatgtcatccccaagttcagctgtctacagctggccactctcccctacctggctggatgtgtctcttctcctatgtaagcagcccatgaatttcatcagtaatctggtatgagtcttaatctgccagaaccagtccccaatcctaagtctctccctccatctcttgctttccatctatctgagtctcagatggtggctatatcacctctcagctggaagttgccacctactcttagcagccaagctggcctttctgaaatacaagtcactgctctgcctaaaactcttatgggtttccaatgaccctcaggataaagtccaatgtcttcccctggcattcaaggcccacccagcctggcccctgcctgtgactctaagctcctccttccccaaccctcctcacccctcccactatccttcactcctgccaaatcagggcctttcctgatgcccagtgtgcccttgaccgctgatcttacagcctcacttggcctttggcttccctctcggccctcaccaccactgtgactgtgtattgatttgggtgtagatgagctccacagggcaggggagtcccagtgctcagcacagggcctggcatatagcagatagttaataaatacagatgtgcctgctataaagtgacacatgccttcctgaaaaacctgaaaaatcctaagaacaagagtttatgggaaaaatagagctgggacaaactactcaaggtctatgcaactttgtaaccagagcactaagagaaaaccattacattcctaatgtatatatctgcacaattaaaaagcatttgttaaattcttccttaaaaaccctcagtaacaactggggaggcattttgatggaaggggttttgaggaagggtggggagacattttgatggaagtgggtgtgaggttcactgctgagttatggagacaagggcaaaatgcacaaagatggagaagcaagcagttggcgcctttacaccagagcaggtggccaagtggtatgaaggtgggccaagtggtacacaagggcaggtgggggaaggtgggcgaatgggcattggaagcagcgctgcttcctccactgtttgctgagtcctgctctgttagcgcccactgtgttcagccgctgttccttggtagcataaaatagtactgcgctggaataagcctgtatgactgagcaggactcctctgcaatgccactttccccgttcactggaaggggtgagatacttgtgtcacaggagcacgctgcatttgtcaagtgggtgagcgcattagtagcatgggttgtgctatattggtgcgattagctcattccatctgtttgtcccgctggacttggtggccccttctgcgtggcaaggtctgtgcctgcattctttgtgtctcaggtcctgtggctcattgaccgccaccgtttaggtcctgaggctgtgacagttcacaggccactgtttctgccctcaaagaaccaaccgagaatacaccatgtggcctgtgggagttacccaaaagcacttgctggagaaatgcctaagctgcccattaagagacttaccataggccaggaaaatgaagtgggctctgaaccttggcaagaaggggtggatttgggagaccaggaggaggtggcatgtgcttttgagggcccagcagaagtggagggtgaagggagggggaggttggtggataactcattcaacattcactgaaccccctgctaggtgtcgcggtctagataccagcaggcgctggtctagataccagcaatacatcagtgaacaaaacaaagatctttgcccatgtgcaatttacatcctagcagggggagcgagataataaacaataatctactaaataagtcatgcagtatgttagcaggtgttaagtactttggaagaaagaacagaagcataatgggatggggaatgctggcccggtgtgaggggcaggggagcgggttgcagtattgggtaggatggtcggggaaggccttctgataaaactgtggtttgaaggaagtcttgcagtaggtgagggagggagcagggtgagtatcccctgctgggtgggggaagaacattccatgcagaggcagtagctcacctcccatggttttccagctcagcactactgacattttggactggattgttcttcattgcggggctgccctgtgcattgcaggatgttggccagcttctctggcctctacccaccagatgccaggagcgtccccgcggttgtaacaacaaaaatgtctgcacataatgccagatatctcctggggacaaaaatgcactgagctagaagagagccctgtggtgggaggctgctcgagtgctgaaggaagagcaagtgggggtggatgtgatggagaggggtgatggaggggactggagttggggaggccagagaggtgccaggtggtggtggtggtggttgagttgttataggggcttgtggctcagtaaggactttggcttttacttgagatatagtagggagctggagctggctctgagcagaggagagagggtctgtattgcagaggtggggagcacggggactccccacagccccatcccaacctgaacagaaacctcacacccccagctgagcaatcccagacccaggggcttggtgacccgtatttgcaaacctttcttctaagacaaaaccagcccccaaaggggacaaattgcttttcatttctctgcttctctgccggcggcttcatattcataacacgatgatcagtatcaccaggaatggggctgttgccttaaaggataaattagtctgactcttaactcaataattaaaactgtgatggcacttggcctgcagggataatatgctattattatagtcgtttgtttcaattaaatgcttactgattttacaatagcagctgggcacctgtgcgctacagctattattctgaacaagacatctacatttcaggagaaatttgtcagcgtgcaaaggatctcccaccaagcatgaaagtgtattagcaatacgtactgacgaggcttcggggccagaggcaggcacgggggaggcttcctattggttctcttttcctctcttttgtgctagattttttttttccaaaaaggagatagttttcaattatttgacacttgaagccccaggacatctcagagagcagtgtgcccctgggaagactcgcatgggggagctttagttgtgacttcccacatcattgattctgggctgcagtaaactgaatcatgccccaccagatgcccatgtcctgatccctggggcctgtaactgtgttaccttatatatcaaaaggggctttgcagatgtgatgaaggtaaagatcttgtgatgggcatatggctctggtttatttgtgtgagctcaatgatgtaatttcagaagtacttacaagagggagatgggagggcccaacagacagaaccactgctgatgaaaccacagaagcagagagcaaaaaggtcatgtgatgtggggccacaagccaaggcatgaggatacggttcatccaaaaaaaaaaaaaaaattatggaaatgcttctcccctggagcctccaaagagaacgagccctgccaacaccttcactttagttcagtgagactcattttggacttctgacttccaggaggtgcatgtgctgttcttgctcctgcaacggaaggaatttttattaagtttgtggtaatttattacagtagcaacaggaaactaatacacagagtctctgctgccttctcagaggactgagacgtgtcgactttcactggggaggcagatatgctgcagatcatagggcttcttgtcagttatcagtgcccagacctgttgcctgtggccatccacttagcatctgcaagcatgcttaccctccaacaagtcccagcctctggatacccctttatccttatctgccaccctacccatcactccagccctgccaggctccaggcagcttgcagagctcatcgcactggcccatgcctcagtgcctttgcatgtgccgttcttgctcctggtacaccctctgcaccctccttatcttctgcagacttcaagagtcagttcagtttttttttttcctgtggaaaggcttcctggctgtccaggtattggaggggctccttctctggcaccccacaggaccccaggcacacctgggttgctgcactgtttaaaattgtggggtcatttctgcctcccccaccagaatgtgcactcctgcgatggggtgtttctggctcagggtctcagacataagaatcctcagggaatgtttatggaatgaatgaatgaatggagtaccaggagcagcatggagctctgggaggtcttgagaagtgaaatggccacagaaagagttgtgatgagggcagctcaagacagaggcctgcagaggatgtgagaaagaggctcgaggcagtgactcaaggaagctcagagtcagaggacagaacagtggccaacttctgggtctctgtcaccatccaggcctctctgccaggtctagacttccaggctggactccagacttgtgacctctgcttctccttccaggactggcatgcaggagctttgtcttgacttctcacatcattgatccaagtgtggtgggctggaagagaatacccccaaaagatgtctacatcctaattcccagaccctgtgaacatgttagcttccatagacaccctgttggctcccaaaacttaacacatgtctgcctgtgctcatcaccttcactctgctcaatcctgctcctccttctatgtctccacctcagagaattgcaatagccaccccttatcaccatttcatcccaagagtcttgcttgactcagccactactcatcccatgcattccactcaatcacctgtcaatatcaatcttcctcagtgcctctcggacctacctggtagatttggccactgccatagactgtaccagccccctctctgggacctcttgtctcctctctcaactgcctcatccatgtgcagccagagtggttccatcgggcaattctgaacacgtcctcccctgctgaaatcccttcgatggctccccatgggtctgggagagccttcccctactctggctctcaggccttttgctgtccatccctgctggcctctgaagcctcagtgaagccaccttgggtcctgccaggtccatgtcagctccacggctttgcacaggctgtttcctcttcctggacaccctcaccttcttcaccagctaactcctgagcagctgcaagagtcaggccagactccacttcctctcggtggccgccgccttctgcagactaggtgggaaggtcgctgcacatgtcttactcctgttcccccacgaccaccacacaaggcgtcttgaaggagggactgtgttctggtcagccatgtgttctctaacccagcatctgcactcagcactggacatactcaacaagggttgctgaagggctggagggagacgtggctgatgcgtggggagaggctggttcttgcccaggcattgggaccctgctcaatgccagggagatgcagagagcttgaatgtgctgggtaatggggtaatatgggccagccaggtggctgtcatctgtcaggttccctggaaacagactccgagatggagattgtgcacagcaagttttaggggagcactctcaggaacgtcacccatgagaagtaaaggaagcagcctggggcagagagagaacttgaaccaacgtgcattgctacagaggcttcagccaatccagtgagctctggaatgctaggatgcgccttctgagatgtcccaaattgagtcaacggggctgggcctttgaacccccacatcagtgaatgtagaccaccccttggaagggcttgtaaccatgggggaagcagctccatcagccacaggcaattcctggagagggttgcagctgcgagctgtcagaagcccatatgcccggcagctggagaactgagtcctgtggtcctgagggggccgtcgggccgtgcaggggtcacagctgcactgattttagagagaggctacaacgcaaggttagagcaagagctcagcttgtggccagcacagggcttggccaagtgagagcacactgagtaggtgttcactgaggctgtgctgggcaagtgggtgcagcaatggggtagggctgtggacacaggcctgggagccacacagacattcatgtgaatccagctgtgccgcctacagccaaatgaccttgggcacgtgacttctcattctgagcctcagtttcctcatctgtaaaatgtcgatgataagcacccctttctcgcatgcctgagtaagaagaaactggtcaacaggtcagtgtctggcaaatgctacctgccacataaaggataacatttctaccatcgcttctacttaccacactccactaccagaaggattgccagtctgtggccctgggccaaaggccctctgcccatttttgtaaataaggttttattggaacacagccacagcccttcatttgcattctcatctatggctgctttcctgctcctgcagcagaattgagttgagtagtgattagagaccatctggcccacaaagcctaaaatatttactgtctgaccctttacagagtttgccaacccctggatctgacaaatatagcgaatatttgtgaagtgccctcctgtgccaggctgggtgctgtcatttttagtgtccttggaggctccctcctggcatccctctcctctcagatttcagaaccttctattgtttctcacctcttcttttcttttttgagatggattctcgctctgtcgcccaggctggagtgcaatggtgcgatcgcagctcattgcaacctctacctcccgggttcaagcgattctcctgcctcagcctccgagtagctgggattacaggagcccaccaccatgaccagctaatttttgtatttttagtagcgacagggttttaccatgttggtcaggctggtcttgaactcctgacctcaggtgatccacccaccttggcctcccaaagtgttgggattacaggcatgagccatggcgcccagtcatttctcacctcttcttagcccagttgaggtgcagttcaagctcataccttaagcaagttaatgaggggatgaagaaaggaaaactttcgtcttgaacacactaggtgtctgactctgtacaaagttagctttttgtttgatcctcacagctgccccatgagggcagggtcattgttaccccatgttgaagctgttaagatctgtatggatacagtggaaaacatctcagactcagaagacaggcagaattctggctttcccactttctggctgtgtgatcttaggcaaatcacttaactctctgggtttcagtgtctttattgtcaaatgggggtgataagagtgcttccatcaaagatttgttggtgactcttctagcatggttcctggggtgtagtgagccctcactcactgaaatactagatattattatcattattattattgctatcattttctataaaacaaggacgttgggatctattggaaagtgctactcttttaaattactcagtgtcaggtagttctttatagcagtatgagaatgaactgatacagaaaattggtaccagtaacggggtgatgctacaaagatacctgaaaatgtggaatcaactttggaactgggtaacaggcagaggttggaaccgtttggaggggtcagaagaaggcaggaagatgtgggcaagtttggaagttcctagagacttgttgaatggttttgaccaaaatgccgataatgatatggacaatgaagttcagtggtctcaaatggagatgaggaacctattgaaaactggaataaaggtcactcttgctatgctttaatttctgattgtgctcagaaattaacgagaagtgctgggtgccgtggctcacacctataatcccagcactctggggagctgaggagggtggatcgcttgagcccaggagttcaagaacagcctgggcaacatagagagaccctgtatctacaaaaaatataaaaaattagccgggttccgtggctccacctgtggtcccagctacttgggaggctgaggtgggaggatcgcctgagcctgggaggtggaggctgcagtgagctgtcattgcaccactgcactccagcctgggcaacagagtccaggaattaaggagacgtttctgaaccctctcaaactgaagcagggacttaaataagagcacaattgaacatagccgttgttgccatcagaagattgattctacatcgtatacatctgtcagcacatcagattggaccctatgcatgtatacaactatgacttgtcaataaaaagaaaagaaaaaaatttaattgtgggggaaaaaaattccacctttccaggctgaagaaaataaaaaaatttaattgtggaaaaaaagaaaaaaaaaaattccgccttcctgggctgagtgtgaggctgtgttgaatgacagctcattcaggcttcggaggacgcagggtggctgccagctctgtgaatcggcagaaggcgggaaggaggaaggtgtgatttttcttgttctctcctcactgtgtggggttacactaagcacacggggctgctctccatagagactgcaaatggggaatttgtgaaaaacgcccttgtgttcctgcagccctgcgaagctattaagctctgcgatcctaattacattcacagccgcctcgttcctgctgcctccgtgtctcctccttcctggggcgggtgcagatgtggctcgggagcgtggccatatgtttccaagagggaagcaggaggctggcttcacttggttcccagacatctcatgagtgccggctgcctgcccagccctctgcctggtgctgggaggcaggtgtctctgcacttgagcagatgccgggaggcaacgtgtggagagctctgccagaggcttggaaagagggtgaggccagaggatggagcaggagagggaaggcttctctgaggaggtgacatttcaggtaagccataaaggaggatgacacagagggcaggtgtccagtctagagagaagcccacatgtccccagggagctctgggaaggggctggagaggtcaggaggagagagattgtacagatcctcatggagcattttacatggctaggccattgctaagtgggcccctgggagctgctgagagatggagagcagggaggcgacatttcatgctccagaagggtcactgcaggggccagcatggtgcctggactcaggaggccatgctggaggctgggactagagctgcatagcttgagatagccctgaaaacagaccctgacacaaaggtttgggtgcaagtagtttgtctcaggggttaacccaggaagcccttggagggaaaaaggcaagtgagattgaaaggaaagaaagtcatgggttgttacctctgtgggcaacaggaacggggtcctgctgtggaccctctgaaagacttgtggatgtgatccgggaaggatgtcaagtcttccaggacgcaaatcagaatcgtcccactgaggggagaggaagtcgaggtttcatctacaaactcctgttcctcactggctgagggtcattcctggggccccagttggtcagcacttccaggctgtttggggcacagaacaccctcaggcagggtgctgagggaagctgtccgcatgcacaataaccctctgtagggacccccgaggtgggccgagggccggggggcagggtctccactgcatctgctgcagctgatcaggacaaaaggccttagctgctaaaagtgttggggcagcggggtgtgggttctgattggagtaggggtctcgtgagctggtagagtgttctagaatgcatggagggatgggcagggtctcaccacttctgtgtccctctcttgtgagctcaactttcttcttctaaaggctgaaattggctttaagcaaaacacgttttgaggtgaaacttgggaattttagaatcatcacggggatgcccctatctgtaggtgtctatggaggagccacagacttacttggaaggaaagtaagatgggaggaaatgtcagaaccttaggaacaccagcgtttagtgggtgggctgaagaagagcaggaaggactggctggagaggtggttggacagtcaagcactgggccctggagaaaggaaagggagctgggaggggaggcagcaggcccaggagttgaggatggagaagtgtcttggggaaggcatcataacttagggaggagggtgatactttggagaagctcaactccacctttagtagctgtgtgattatgggcaagtctcttggcctgagacttggctttttctgctggggatgattatattccgcctcctgtatagttgtgattaaatgagtcataagtggacatggtcagcacagtgtctggcacatattaagtgcttaataaaaatctgtcctcctcttcctctttctcttcctcctgatgaggatggtggtgaggacactgattacaacggtatgggtagtaatgaggacagatgccaggtgagtcgctggtggggggagtggcccaaggacagtgaggagagacaattctttgcacagttggctgcatggagaagaaggaaagttggggcagaagtttttaagagacctggagctaagagagattttaaaagatgggagaggagtgatattgatgagatgcagccgacagacaggggagacaggagctgaactgatggaggtgggggctgtctagaagcagagcctgagatggggttcttgtgaaggttgtttactgagggaggggctgcaggaatcagggattgcaagggaaggggctgagcatggatgtagcctcggctggagactcgcttcaggctgattccacagggagccctggagcgcagcttcactgcacagccagcagggtggcctttagcacccctgtgccagtcaagcagtggtgaggtctgctgcaaggtgggctgttggcgttaagatgtcatagtctcctgggagaagcagttcccatttggccacttttctggagatgggggcaggtgcagatgatcccagcacacaggggaatgggtacagaagcatggtaaagggggcggagtccggcaccgacagtgtccactacagcgggcatcctcaactagcaggcctcaaatgagaggcatatctttcaccgtggggaagttaggacaaagttttttaaatgccctagaaaacctgggatgcttagtggctgtccccatgtttttgctggtttttatctaagaatagccagtcatgtactgtctttatgaagggaactgtctctctgactgtgagaccctgaagtgcggttggggaagtgggcgctctcatccccaaagcttgccattgtgtccatcacaaagcatggactcatgaaaggtccgactatatattgagaatgtatttgtaactatagcaagaatgaagcttctccacagagacttgacatccttcctgaatcgcatccagttctgctgttgtggctttaattttattaaataggtccaacaagtatttgcttttgcagtgtgcaggctcgaatctaggaatcaggatataaagaaaagtcactggacaattgtacaaaatccgtagttctaaagagcacacattctgagaatcttactccaaaaaataggcaaaaacattcataataaacttcaattatacggtgtatccatgtgatgagaagaatttgcaatcaggaaagattgctttcaggtaaaacatgtgtattagtctgttctcatgctgctaataaagacatacccaagactggataatttataaaggaaagagatttaatggactcacagttccacagggctggggaggcctcataatcatggcggaaggcaaaagagaagcaaaggcacgtcttacgtggcggcagacaagagggcttgtgcaggggaactcccgtttataaaaccatcagatctcatgagacgtattcactatcacaagaacagcacaggaaagacccactcccgtaattcgattacctcccattgggtccctcccacaacatgtgggaattacagaagccacaattcaagatgagatttgagtgtgaaaccatatcaatatgtgaccactggatgtaaaagtttgttgaaagcagcgagcaacactggttgtaaccaaataagtgaagatgatcagctccaggttttctcccaaaactccaagggagaagttaaagggctcaaaattatgactgaaaagataaaagatcgtgatgattcaatgtgtttaataggaaacttagcaaaaaggcaataatcaaataattgtagaaaatatcacttatctgaagaaagtggaaaatgttccaaaggacctagcaaatatcagcaaaattaaatctgttacccacattaaaaacatcatagtgcaatgtttttatttcaaagaaactttgagactcaaaaaagccattattattgttgtcattattatttgggggatcggattttattctaagaggatcaacaagccaatgaagaattttaaggaggatagtagcctggcctgacttatttatatagagagatattaattgcttgggatgtgaggagtgtgaaagacataggattcattatggaggtggaaccaataatggcgtgtcctggctagtgcctggggttgtaagggaaagggagaagtcagggtttctgttcaggtttgtggcttgggtgacagcaagaacagcagtgccattttactattttggtaaaactggaggaggaacagttttcaggagagggaagagctccatttgcagcatgtgaagttttatatgcttgcggggcatccgagggaagatgtcactcagggacttggatgtgggagtctggagcccaggttggggatgaggggatgaggctgaccctgtttcagacatttcagggtgcctaatgtggccaattaagttatgtaggtaccagccatttcccctcattccagacttcccagaactcatcacatttaagtttaacactctgcttggaagagcccatattgttgttgctgctgctttggatctgcttttgaagaaataaatattgcaggtacaagttaaggtccctttgtacctctctgttctcagaaagaaataaccactattctgcagtgagtgtttttatgcttttactacattttcatatatccttgaacacctgacagtgatgttttatattttaaacgtgttcataaaggcattatactgtatgtgtccttctgaaactatcttcactggttattgtctttgagttcatctgcattggcagctgtaggtccacgttggtcaggttaaccgtctacagaattccattatgtgaatacaccacagattttcgccatctcccagttagtgaatgtttatattatttccagtttttttggaattaaatgccataatgatcatctttgttgtaatgcataactttctaaaggtaacatcataactctcatacaaatataagatgaaagcatgccaaaaatttatttaagtcgtgattaatgaggaatccagtaagatatgacaacaggttcaaaggtgaatctgaagagtagacacatatataggcaaacaggaatggtgagataaattttctaagaaatggacccagccatcccattactgggtatatacccaaaggattataaatcatgctgctataaagacacatgcacatgtatgtttactgcggcactattcacagtagcaaagacttggaaccaacccaaatgtccatcagtgatagactggattaagaaaatgtggcacatatacaccatggaatactatgcagccataaaaaaggatgagttcatgtcctttgtagggatgaactggatgaagctggaaaccatcattcttggcaaactatcgcaagaacaaaaaaccaaacaccacgtgttgtcactcataggtgggaattgaacaatgagaacacttggacaaaggaaggggaacatcacacactggggcctgttgtggggggcggttgtggggagggatagcatgaggagatatacctaatgtaaatgatgagttaatgggtgcagcacaccaacaaggcacatgtatacatatgtaacaaacctgcatgttgtgcacatgtaccctagaacttaaagcataaaaaaaaaaaaaagaaatgcaaaactgcttaatggctatagagcaaccaaacataatgtttggaatcatcctttttacagggtgggatcaattatatccctaccggacaaaatttctttgcatttttatggacaagaatgggtttcactctacctcacacctattaggatggcttctattgaaaagagggagagagagaaacgagtggcgtggatgtgtagaaaccgcaaccggaacccttgtgtgttgctggtgggaattgaagtgatatagccactgtggaaaacagtatggtggtttcttaaaaattaaaaaacagaattactatatgatacggcaattggaattctgggtgtctactcgagagaattgaaagcagaggctccacgagatacttgtgcacccacattcctagcagcattattcataatgcccaaccaactgcctaccagcagatgaatggataagcaaaatgtagtctatacatacaagggtgtattgctcagccttaaaaagggaagaaagttctgattcagctgccacgtggatgaaccttgagtaccttaagctaagtgaaataagtcagtcacgaaagaatactgtgtgattccacttgtttgaggtacctggagtagtcatagttctagagacagaaagtagaagagtggtttccagggctgggggaagagaggaatggggagttcttatttactagggatggagtgtcagttttgcaaaatggaaagaattctgcagacggctgctggtgatggctgcataatggtgtgaacatatttaatgccactgaactgtacacttaaaaatggttgatggtaaattttatgtgtattttatcacaatttaaatttttaatgattaaaaaaatcagttgcattaatgtcacctttctagagcttacaaagttgtaaaatagcctagacaaagacgtgtactcctatagaagcaggtaaccccagaggtctgctggacaatgccccgcagttcattgaatgacactcatttgtccatcttgaagtcttttgcagttttccacactgtgtgtatgtcttcttgtgcatgtgtgaaagttctttatagtaaacatcttggagtagaattctaggttataggatatctgcatcttcaatatactgagtgttgccaggttgttttctaaagtgttttacatactagtctacactcctaacagcagtgtatgcagaaacataaatggtccagtaaacttatgaaaaggtggtcaccctcactagtgatcagaatggtggaaatcagaatgactttgagagaatttcacacttagcaggtttgcaaaacttcaaaaatccgccattatcaagagttggtaaaaatattaaatcaccaagtcaggaatatctgatggaagaattctaaagcaggccactgggaagaaaaagaaaacaagccctaatacagagttctaaagctgatttgatcttgaggagctaatgccagattcttgcttaaggcttatagaaggtgagagtgcgtaagctatggggtgggaagaggagaatgtttggagaatacattttaaaaccttctataaaacagttcactttaaatctgtctctcagatatttgtatgattaataatcaaatacatatatgtcacaatatattaagaactgggttagaaaccagtatctacctacacactgtttacacttaaaattatgcaggacaaaaataaaacagtgaaaacttagagtgataatgatagcagataaagtaggatgtaagacagaaacattaaggcaaagatgcttattttttatgagcaaggagaagccacagtaaagacataacattctgggacatttacaggataaataacttcacgttagtgtgtatgcagaaaatctgtttaaattttagagagaaactgctggaaacacaataggaatggcaggctttgtggaaaacagtatggtggtttcttaaaaattaaaaaacagaattactatatgatacggcaattggaattctggatgtctactcaagagaattgaaagcagagtctccacgagatacttgtgcacccacgttcctagcagcattattcataatgcccaaccaactgcctaccagcagatgaatggataagcaaaatgtagtctatacatacaagggtgtattgctcagccttaaaaagggaagaaagttctgattcagctaccacatggatgaaccttgagtaccttaagctaagtgaaataagccaattcttttgagattttacacctaaagtaaagtagtcaaaactgtttattgaatagacatatggagaaatttgtacaatatacagtattatttccaatatacatgaacggttttgcaaaaattgatcatactttggtgacacaatagtctgtataccaaacccctgtgacatgcaatttgtctctataacaaaccttcacatatacccctgaacctaaaagtttttaaaaaggaaaaacaaactgatcatatcctaagctataacaaaaatctcagtactttccaaaaagataaaattctgggagtcatggtctctgatcttgataacaaaggatacattaaataaaaacactcttccaaataactttagggtcagagagaaaataaaatcatcaatgtagactattttaaaaatacttatatgatgtagctaaaattctccctgggagaaaaatcatagttacagtgcagagtttctcaacctcagcactattgacattttgggatgcataattctttgtttagtggggacatccctggccactacccagcagatgccagtagcttcccaccctccagttgtcagaaccaaaaatgtcttcagagaaatgccccctgcatggtaaaattgctcatctcaactcctgccctagatgtttctgttactaaaaaagaaaatgtgaaaatagcttaatttgaaaacctatgtaaaaaacaacatatgctacctcaagtcaacattaatagagaagaaagcagaatttaatgaattatcatgaaagttgtcaannnnnnnnnnnnnnnnnnnnnnnnnnnnnnnnnnnnnnnnnnnnnnnnnnnnnnnnnnnnnnnnnnnnnnnnnnnnnnnnnnnnnnnnnnnnnnnnnnnnnnnnnnnnnnnnnnnnnnnnnnnnnnnnnnnnnnnnnnnnnnnnnnnnnnnnnnnnnnnnnnnnnnnnnnnnnnnnnnnnnnnnnnnnnnnnnnnnnnnnnnnnnnnnnnnnnnnnnnnnnnnnnnnnnnnnnnnnnnnnnnnnnnnnnnnnnnnnnnnnnnnnnnnnnnnnnnnnnnnnnnnnnnnnttatatatatatatatatatatatatatatatatatatatataatttaccaaaactgactcgaggagaaaatggaaactgaaatagacctattagccatgaaggatattgtgaaaacaaaaagcactgggcctcagatggttttctgtttaagctctttcattctctaaggaaaatgtaatttatatgttatctatactgttccagggcataagggaagagttcaatttctaaagctgatcataacaaaaacatttgacaaaagtaaccctaaaaaataaaaactaagagatttgtaataaaatacatgccagacacattcaaacaaacatacaggcaaggacagcattattcatatcagactccactgaattcaaggcaaaaaaaaaaatgagacaaaaaagatacttaataaagagtttaatccataatgaagatacaattgtctgtcttctttttgtaataaaaaccaatatcagggccaggtgtggtggctcatgcctataaaatcccagcactttggcgggccgaggtgggcagatcacttgaggtcaggagtttgagacaagcctggccaatatggcgaaaccccgtctcgctctactaaaaatacaaaaattagccaggcatgatggtgccacctgttgtcccagctacctgggaggcagaggttgcagtgagccaagatcgcgccactgcactccagcctgcgcgatgcagcacaactctgtctcaaaacaaaaccgacatcaaattcccaaaacaaacactttaagcattaaaaggagatttttttatggaaacagaaaaattgcaggcaatctggacaagcctgtgtaagattaaagagccaaaaaggtaaggaatctaaagaataatcactgatggaatggaaaaatatactgctgtattcatctgcaaacatagcctattctttgtaaggactgtggaatatgtacacaatttaatcatatttgggtctcaaagaaaaccttaacaaaatctcaaacttgtaaatagtacagaccccatactttgataatttttgttactggaaattgtagccaaaagaaaaagaaaattagccacttagaatttccagaactcttctttttgttagcctttttaaatttaagctccagggtatatatgcaggatgtgcaggtttgttacctaggtaaatgtgtgccacggtggtttgctgtacctatcaactcatcacctaggtgctaaacccagtatgcattagcatttttcttgatgctgtccctccccttgccccctcaacgcgccccagtgtgtagttcccctccctgtgtctaagcgttcacattgttcggcttccacttacaagtgaaaacatgaggtgtttggttttctgttcctgcattagtttgctgaggataatggcttccagctccatccatgtccctgcagaggacatgatttcatccctttttatgactgtatagtacttcatgataggtatgtaccacattttctttcagtctatctttgatgggtatctgggctgattccgtgtctttgctattgtgaatagtgctgcagtgaacacacacgtgcatgtatctttatgatagaatgatttatattcctctgggtatatacccagtaatgggattgctgggtcaaatggtattccagaagtcttcttgaacaactcttggatcaaagaagaaagtagattttaaatgttctcatctaagcaatgctaggtgaggtgatgaatatgtcaattatttcacagtgtatacatgcatcaaaacatatcgtacatataaatatatacaatttgtcatttgtcaattaaaaaataaaatacaactcaaaattgagggggaagcagcaattatgaatctttaaaatgcggaggaagggatagctaaagacaaagaattagaaaacagagaagcagaagtgatacacttgagatttgattcttttgaggagaaaagaaacaacccacataaaactgaaaacctgtttgctttcctaatgaagaaaaaatgggagaaaaacagatacttgatgtttgttagaaattagaaagggcaaataaataaccacagatgcagaggaaataaaaatcgtaagagtatgcaaataggtatgcttcactcaacagggtgtggacatatatttaggtccaaagtcctgtcctcaatgcgtgtttagtgtgaaaaatgcttatatgtaaaaccaataactttccagaagtaaccagttagaaaatatcatggggaatggagttaataacaaaattgctgacctgtaggaagaaaagtactcaactttatcaagaaatttatttattcaatgtatttaacacatgcttatacaatatagggcttactgtatgccaggtacatttgatctttaagaaccctagaatgtaggtttgctcatatccacattttacagatgaagaaactgaggcacaaagaggttaggtaacttggccaaagtcacccagctggtagaatggcaggaccaggattcaaaatgtagttagcgtcgtccagcatctgtgtgcgttgctatcatgctgactgctcagttcatgcagagacatattgcattccaggagggaagactcggtctcatcaaatgatccaacataactggactgagctctctggcaggggctgaaatgcaaagcgtctgtccgaggtgaatgtcagtagaatggcacacagccacggagctgccggtttcccacgagtgcacttaatcatacagaggtccaagtagcatgaggctccatcttgagattcacctgtcagggatcggagcaggagccgcacccatcacttctcctctgcattccctcctctaagtccgctagcacagatgtgatggagtggcaggacagatccttcctaactcaaccctcctgtcctcctctcttagatccaggagatggtccactcggaagtggctgcctatgactcgggccggcccgggcccctgctgggtcgcccggcaatgctggccagccacatgagtgccctcagccagtcccagctcatctcgcagatgggcatccggagcagcatcgcccacagctccccatcaccgccggggagcaagtcagcgaccccctctccctccagctccactcaggaagaggagtcggaagtgcatttcaaggtatgtgcggtggaggaacagagcctgaagctgccctcctgtcggcagggaaggggtcctgtggggaaatgggcatcacctccctctagtaaagactagaaaagcctgatgtcccaaggtccccgtaggtgccattcccactgagcaggcgttcctggtggcggttgggatgtccgccacagagctcagtggttttctgttaagacccccaggccacgctggaagccaaggaaaaagcacattggcaggtggagcacctggtcaggggggatggcacctatggggctttgtggcatcgggctttggctgctccaagtgctgagcgtccttgacaagctgtgttccctcggggctcccacagccttgtgcgtaaagcagagaaaattccaacaaatgttgaggggatggggtgagaagatcctgtgaaagttggcaaagactgactcctgaaggccagtgggcgatttcagaggtgtggacggcttcagcaaggccatcggggtcacatttatggccatttggcccttttaggagaaaatattctgacaaaactgtgtggtccagaagacagcacctctgggcctagagtattcactgaccttgagggtggggtgcaaaaatgacccccccactgggaacatgcattcccccaacattcctggagtctagagtggtttgacctcctcaagaacatggtagggatgagagcccgccacctgtccgggctctggcccttctttgcattgactccaaatccacctcccggtgagagaacatcttgtcttaccagggaggaaaacagaggcccagaaatgccaaagacagaagtgtttgcccagggcctcccagcgagctagtggcagaattaagacttatctccctccatgcctcctgcctctgtcgatccagtgtcctttccacgtggtggcctcccgaggcctagggcagtaaccctggactttgggggaagaggggtttacttctggatcctggcccagcttcatcctaaggatgactcgacctctattatagtccatgcaggaacggtttttatttaacaaacactctctatgggccagacactgctctaaacacataacaagtatacgtccatgtaatcctcataaaagtcctatagggcagggactgttattatctctgtttggcagatggggacactgaggcacagagaggttaagtaatgtatctggtgtcacacagctagtaagtggggggaaccaggattcaaacccaggaggctgcaggtgcagtccagtgtatgtgccctcaaccccctgccctgctgtgcctgttcaggactttatcaatgacaacatgcctcttcatccctgatcttgctagggtcacaccacggtgctaacacaactggggcttggagaagggagtagctgcagagataagcctcaggaacagaaccatgtccttcagacatggatgcctgatcatgcctactggcccatggctttgtcatcaggtcaacatgtcacctccatcttcttggctcctagagccagagtcttcactacagggtccagggcttttgaccaaagtcccctgttcctacatggcttgagtgacccaacagagacccactgaggtctgtggtgggcatcccaacaccaccccatcctggaagccctaagtcaagtgttcacaggatcatggtcctgcagtctgtccagagtgaagccactggttccagggctgacgcagtaacagtcgctttagcctcgtgccctccccacttcacagggtcaagggactaagccacctgctcaaagctgcacagctgaaacatggcggtggagaccagccttttgtaatgcaggatcctttttggggattgtgctcacaagtgggagggcagatatatatatacacacacacacacacacacacacacatatatatatacacacatatatatacagacatatatatactatatatacacatatatatacatatatactatatatatacatatatactatatatacacacacatatatatactatatatacacacacatatatatacatatatacacacacacacacatgtatatacacatatacacacatgcacacacactccaaacttggaaataggcccccaaataactgcacattctttcaatgtcataccaaagccttggctaacaggctcactcaataattatctgattccctaggaaactggacctttgctttgattcattattcactattgattaggggatttcacaactctgtaaaagaagatgttaccttgggcgggggaggggaagtgataagagatgtaagggatttttgtctgattataaggcaaattaactttgcccggtagagatgcaaatttctgtccagtagaaaagattaaaagtcccaaaggtgatagtttcagcgctctattgggcactaaccagtttcacgtgtaatttagtaatctaattccagcattctttccattctttcagtgactatacagtccgtcttctcctcctgcatttctctgaatcaactttacaatcatgctgattctctttaatgagttaaacacccacccagggtgtgtgtgtctgtctgtccattgccccctccatcgcgcgagtggttatctgtgcatgagcagggctggagaagtgcagctcggcccaagtctgtgttgatcgcctttggcaggaggcccttgggcttctttggttttctgactcttctcactcgggcagatctcgggagaaaagagaccttcagccgacccaggaaaaaaggccaagaacccgaagaagaagaaaaagaaggaccccaatgagccgcagaagcctgtgtcggcctacgcactcttcttcagagacactcaggccgccatcaagggtcagaaccccagtgccactttcggtgacgtgtccaaaatcgtggcctccatgtgggacagcctgggagaggaacagaagcaggtgagcctccctctctttctgggccatcccctgaggctttgtggtcctggaaccaaggacacactttgaaggtctgaaaccaggcccagctctggaactagagactcttacagaggtctttcctgggctcaggttgcccatctgtaaactgggaagctagctgccttccaattctactaaccaactgcatttactagcaacttaaccactctgaacctctgcttcccgcaacttaaccattctgaacctctgcttcccccttgataaaatgagaacaagcatctccatccatcttgtcccaccaaccctaaaagtctggagtccaggccagagcttcctatcccactgaccatgtgcctgtggcctcctctaaaggcctccagggagaatagagagcagaactagctggtaggcaaatggagttgccagctgtgtgacctcagcctgaccacctaaactctctgagcctcggttttcatgtctattaaaacaggggtgctggctactccttctctgagctcacatctgggctgggctttccccccggtatgtcactgaatccttacaacaccctgtggagtagccattgctttcctgtttggtagagacaccaagaggtaaagtgactcacccagggtcaccagcgtgaatcaaggtagagtcaggatttgaactcacatctgtagaagcaggaggctcaactgggctgttggcatgagagacatgaatcaaataagcagatgagtaaatgtaaaattacaattgtgattgtgccgtgtaccaggagggtacatagttcatgagagtggaaagagcagggacggacattgtcccaggggtcaggtcaccaggtgagacctgaagtgtgagttctctttggaggaggggaagtgttccagacagggaggcctggtaaggaaggaggctggaaaagcacaggggactgaaaggagaccaggatggccagagaggagacaataagagtacccatggcagagacggagctggaaaggagggcaggggccagaccacgctgggctttgcagaccttggaagtagtcaggccctgttctaagaggagagaaaaccagtgaagagttttatgcagaggagagactggaacggcagcataaggcaggtaagagtggatgtggagggtgcacagtgatccaggtgggggaaggtagggtctggagcatcttccagaatggtttagggtaggggacacagagcatgtcctgggagcctccttgcatctggcttccattctgagtaaatggagatgccagtcactggatgggaaatatggggaaagtagcaggcttggggcagagagatgaattactgacttatttgaaacatcatctttaccgtattctaaaattttaggtaattttggaatatgttataatgcagagagtttatttgggagatgatccccacctctggtaggggagtggggaaatgagacagggaaaggagggcagccaggaaagggcacattgtcccaggagaatccaccatgggcaactggagcacaatcccgctgggaactcaggagcctgcttagaacgtgccaggcctcagggtcatcctgtctgaggggcaagggtgctggggtggacaccagcattccttcagagctgctccaggggacattacttctgcagcacccctggcctgctacacatgccaggctcctgccaccagagggaccctcaggcaaaggaatatagccggtggcagctggaagtagagcatgtttgtaggacaggggtaaggactgggggatattggcagggcactgtggcttttgctatagggacgtctgtcattttcacttgtgtgtttcgttggcaaccaattccctttcaaaagacttcaggttgtttttgtttggtggggggatttccttgccgttttatacagtctggggagacagtggtctcaagtcctatgtccccgggcactccctccaccgatgctttctctgacctcattcagcgcagcccagaggcaagcaaaggtggttgagagtcccagcccctgtgtcggtttcatttctgcttacctgtctgacgttttatttctaacccaagaacttggcatatatttatttccatccgataatgggcatttctctccttttacttaatgcgttcttttacttaatgcgttataaatggcttgtttctccccattttcctagcaaattgttgagtataaaaagttaggaatttaatttgtaactgccaagcttactatttattttatcatttctgatcatttttaattcctgagtcttctaggtttaaaaaaagtgtctataattatacacatatttatacatatgtatcttttacaaatgataattttgtctcctttgttatttgttttttaagagacagggtgtcactctgtcacccaggctagaggtcagtggcatgatcatagctcactgcagccttgaactcctgggctcaagcaattttcccagctcagcttcccaagtagctggactacaggcgtgccatgcatcaccatgccccacaaaattttttcttttttttggtattttgtagagacagggtcttgctgtgttgctcaggctgacaaactcttagcctcaaatgatcatcccaccttggcctcccaaagtgctgggattagaggcatgagccactatatccagccatatctccttattttgtctcctcacttctcagatttctaattctgttttcttttcccagttatgttgactaggacttctaaaaaagagatgttcagcaatggcggggatagtggtcttcttactttgcattacctctcatgtttcactattaagcataaggctggatgttagcttgtgtcagtttttgaaatcacatttagaaatgtgacttatattcctattttactattaatacactaataaccaagagaggtagtgagaaaataataggaaataaaaaaaccttgcctatcccccaaaagtttcaagcctaggtgatggataggaaagttctttcaaatcatcaaagagctaataattccaagacttagaaaaataagaaaaccttcacaagtctttatatacaatgtaaccttgacactaaaacataatgaagctaactgcatcatttaattttgaatgtgtaataaacaataccaaaatttaatggcttaaaacaataatcatttattcaacttatgattctgagggtccatgaactgtgctgggctcagcaggatggttctgctgctgctcttggctgggctcacccatttgcatcagtggtcaactacagtaaattaggcatctctgcttctgggagttggatggctgtcagctggagcagtggagccaaactgggccatgtgtctttcatcatccagcagactagctcatgcttattcacatagcaagtcagagttccaagagcagttttagagcagaaaaatggcaggaaggaggcaggactaacttgcagctcccactcggacagacagagcacggagactcacattgtgaacttttgctccaagaactaccacaggaacatactaggaaagccaaaagaatccacagacactttgaaggatgtggattgctgctgcaggctctctgggacagccaaggaattgtgagttggcgtgctttctcagctgggaggcctgtagcctggggcaagttctcagccctgttcactagctgcctggaaataaactcggtgctgttgggggtgcatggtgggagtgagaccagcctgtggctgccagctttccctcacttccctgacaacctgtgtgatgcagcagtcagccataatccctctgggaaccacagcccccacagcatctgcagcaagccccacctaaccctgcccctacctgatggtctttctctacctgccctgttagcctaagacaaaggacataatctctcttgggaactccatggccccgcccaccacctgacactagggcaagcttgtatcctccctatactactgcagctgatgtgctctagaaagtgctacctcctggctagaggccaaccaacacaaaaccagtgcacttaaaaatacaaccaaggaccctcatggagtccacttcactcccctgctacttccactggaccaggtgttgatatccatggaggagagacctgaagacagatcacatcacaggactctttgcagacactccccagtactagcccagagcccggtagctccgctgggtggctagatccagaagagaaataacaatcactgcagcagggctctcaggaaaccacatccctaggggaagggggagaaccccaagggacaggagaatctgaatagcagccttgagtcccagatcttccctctgacatagtttacccaaatgggaaggaaccagaaaaataattctggtaatatgacaaaacgaggttatttaacacccccaaaagataacactagctcaacagcaatggatccaaaccaagacaaaatctctgaattgccagaaaaagaattcagaaggttgattgttaagctaatcaaggaggcaccagagaaaggtgaagtccaacttaaaataaaaagaattatacagcatatgaatggaaaaatctccagtgaaatagcataaataaaaacaatcacaacttctggaaatgaaggacacacttagagaaatgcaaaatacactgggaagtctcagcaactgaattgaacaagtagaagaaagaacttcagagctcaaagacaaggctttcaaattaacccaattcaacagagacaaaaaattttaacaaatgaacaaagcctccaagaagtttgggattatgttaaatgaccaaatctaagaatcactggtgttcctgaggaagaagagaaatctaaaagtttggaaaatatatttgagggaataattgaggaaaacttccctggccttgctagagatctagacatccaaatacaagaagttcaaagaacacctgggaaatttgtcacaaaaagaaggaaaggaaaacctttcagattaacagcagatttcttagcagaaaccctacaagctagaagggattggggtcctatttttagcctccttaaacgattagccaagaattttgtatccagcaaaactaagcttcattacagttctttttttcaaagcaatgctgagagaatttgccactgccaagccagcactgcaagaactactaaaaggagctcaatcttgaaacaaatttttgaaatacacaaaaatggaatctccttaaagcataaatctcacaggacctctaaaataataacacaattttttaaaaaccacaaggtatttgggcaacaaatagcacaacgaatagaatagtacctcacatctcaatactagcactgaatgtaaatggcctaaatgctccacttaaaaatacagaatggcagaatgaataattgaccaactgagtatctgctgtcttcaagagactcacctgacacataaggacacacataacctttaggtaaaggggtggaaaaagatactccatgcaaatggataccaaaagtgagcaggaatagctattcttatatcagaccaaacaaactttaaagcaacggcagttgaaaaagacaaagagggacattatataataaaactagtccaacaggaaaatatcacgatcctaaatttatatgcatctaacattggagctcccaaatttaaaaaaataattactactagacctaagaaatgagaaagatagacagtaaaacaacaatagcgggaaacttcaatactccactgacagcactagacaggtcatcaagacaaagtcaacaaagaaacaatgaacttaaacttaccctgcaacaaatggacttaacagatatttatagaacattctacccaacaactgcagaatatacattctgttcatcagcacatggaacgttctccaagatagaccatacaataggccataaaacaagtctcaacaaatttaagaaaataatagaaattatatcaagtactctctcagaacatagtggaataaaactggaaatcaactccaaaaggaaccctcaaaacaatgcaaatatatggaaatagttaaataacctgctcctgaatgattgttgggtcaacaatgaaatcaagatggatattataaaattatttgaactgaacgataatagtgacataacctatcaaaacctctaggatacagcaaaagtggtgctaagaggaaaggtcatagcattaaatgcctacatcaaaaagtctgaaagagcacaaatagacaatgtaaggtcacgcctcaaggaactaaagagagagaacacaccaaactcaaacgcagcagaagaaaaaaatgaccaagatcagagcagaactaaatgaaattgaaaccaaaaaatacaaaagataaacaaaaagctggttctttgaaaagataaataaaactgatagaccattagtgagattaaccaagaaaagaagagagaagatccaaataagctcaattagaaacaaaacatgagatattacaaccgataccacagaaatacaaaagatcatttaagactactatgaacacctttatgtacataaactagaaaacctagaggagatggataaattcctggaaatatacaaccctcctagattaaaccagaccaataacaagcagtgagattgaaatggtaattaaaaagttaccaacaaaaaaaggccaggaccagatagattcagagctgaattctatcagacttttaaaggacactattccacaaaataaagagggaatccttcctaaattattctatgaagccagtcaatcaccctaatacccaaaccaggaaaggacataacaacaacaaaaaaacgaaaactgcaggccagtattccttctatgcccaaaatcagcatagaagggatatacttcaaggtaataaaagccatctatgataaaccagagccaacattatagtgaatggggaaaaattgaaagcattccccttgagaactggaacaagacaaggatgcccactcttaccacttctattcaacagagtactggaattcctagccagagcaatcagacaagagaaagaaagagcatccaaatctgtaaagaggaagtcaaagtgttgctgtttgctgatgatatgattgtatacctagatgaacatgaatgcaaaaatcctcagtacaatactagctaactgaatccaatgttgtatcagaaagataatccaccatgatcaagtgggtttcataccatggatgcagggatggtttaacatacacgagtcaataaatgtgatataccacataaacagaatttaaaaccacatgatcatctcaatagacacagaaaaagcatttgacaaaattgagcatccctttgattaaaaccctcagcaaaatcggcatagaagggacataccttaaggtaataaaagccatctatgataaatccagagccaacattacactgaatggggaaaagttgaaagcattccccctgagaactagaacaagacaaggatgcccatttattcgatgcagtactggaagtcctggccagagcaatcagacaagagaaagaaataaagggcaccaaatcagtaaagaggaagtcaaactgtcactgtttgctgatgggattatcatatacctagaaaaccctaaagactcatccaaaaagctcctagaactggtaaatgaattcagcaaagtttcaagatacaaaattaatgtacacaaatcaatagatctgctatacaccaacagtgaccaagctgagaatcacatcaagaactcaaccccctttaactgcaaaataaataaataaataaataaataaataaataaataaatgaataaataaaatacttaggaatatacctaaccaaggaggtggaagacctctacaaggaaaactacaaaacactgctgaaagaaatcgtagatgaaacaaatggaaacacatcccatgctcatggatgggtagaatcaatagtgtgaaaatgaccatactgccaaaagcaatctataaattaaatgcaattcccatcaaaacaccaccaacattcttcacagaactagaaaaaacaatcctaaaattcatgtggaatcaaaaaagagccctcatagccaaagcatgactaagcaaaaagaacaaatctggaggcatcacattacccgacttcaaactatatggccatagtcaccaaaacagcatggtactggtataaaaataggcatatagaccatggaaaagattagagaacccagatataaagccaaatccttacaaccaactgatctttaacaaagcaaacaataacatgaagtggggaaaggacaccttattcaacaaatggtgcttggataattggcaagccacatgtagaagagtgaaactggatcctcatctctcaccttatacaaaaatcaactcaaaatggatggaagacttaaatctaagacctgaaaccctaaaaattctagaagataacactggaaaaacccttccacagacattggcttaggcaaagacttcatgaccaagaacccaaaagcaaatgcaacaaaaacaaaggtaaatagatgggacttaattaaactaaaaagctgcacagcaaaagaaccagcagggtaaacagacaacccacagagtgggagaaaatcttcacaatctatactttcgacaaaggactaatatccagaatctacaaaggaactcaaatcagcaagaaaaaaacaatcccatcaaaaattgggctaaggagatgaatagagaattctcaaaagaaaatatacaaatggccaacaaacatattaaaaaatacttaacatcattatgatcagggaaatgcaaatcaaaaccaccttactcctgcaagaatgtccataatcaaaaaatagatgttggcatggatgtggcaaaaagggaacacttttacactgttggtgggaatataaactagtacatccactgtgaaaaacagtgtggaaattccccaaagaactaaaagtagatctactgtttgacccagcaatcccactgcttggtatccacccagaggagaagaaattttacaaaaaagatacttgcacatgtttgtagcagcccaatttgcaattgcaaaaatatggaaccagcccaaatgcccatcaatcaatgagtaaagaaaatgtgccacatatatatacacacatatatatgtacacacacacacatatacatatatatgtacacacacacacacacaaacaccatgaaatactactcagccataaaaaggaaggaaataatggcatttgcagcaacctggatggaattggagacaattattctaagtgaagtaactcaggaatggaaaaccaaacattgtatgttctcataagtgggaactaagctatgaggacacaaaggcataagaatgatacaatggactttggggacttggggaaaaggatggtagtgaaggataaaagactatcatcaggtacagtgtacactgctcaggtggtaggttcaccaacatctcagaaatcaccattaaagaacttattcatatacaaaaaaaatttttaaataagagttccaagagtagcaagagggctcaccaatatgtgatcactttgtcagtctctgcatgcatcacatttgtgcttgtcttattggccaacacaagtcacacaaggctaagctccaagtcatttgcacctcctcgtttctaccaaaagccatggaaacaaggaggtgcgaacaaactgggaccagtcctacaataacatatgaacctaggtctaaaatttttaataaaaaatattagcaaaccgaatccaaactaacatactatgaacaagtaggttcattctaggttgcgaaggtggttcggcattaggaaatctgcactgtgctggctcagcatgggggcttcaaagggcattgtctttctgtgatcagttgtgctgatagaacctggaggcccagagagatgaagcatgttggccaaggccacacagtgacttggctgaggaactgggatatggcctggtctccacaatttctctgcagcgctcccagaaaggggccagtggctggctgactcagcttctgaccccaccaccctcgtccattcgtgatccttgaatccatgccttcccaccccaggaccctgcacggcatctcctctgtaactttctccccagtgttgctcatgtgttgactcttccaggcctacaagaggaagacagaagcagcaaagaaggaatatctgaaggccctggcagcctaccgggctagcctcgtctccaaggtaacacccggaatctccaggcacagccctgatcagagtggggccacttgaggaatggagcaagaactggggcccgtgggaagggccggcaccccaggtcttagaaagaatggctcagacctacatggtcatgtctgcagggcacctacagcgtgccaggctcattctgggcactttacatgcatttcattggcttcttccaacaagaacccagcacccagaggggttgagcaacttgcctgaaaagatccagtttgttaaagtggccgcactaggattcaaacccagttttgccagttttatgtggccttcacttctgaccgctgatggggcttgggacacgctaccccaaaatatggcacctcctcaccacaccgtcggcctcctctgtcaacaccagcaacgtaggaagctaagtgtggctgcggatgcgtggcccaagtggaggtgggtgttgttcctggtacagaagagatggcatccaaactggtctataacaggccaagtaaaaggtggttcaaagtcaagggaacaacatctacaaaggcacagaggttggaaggagcatgattagagctggctcagtgggatggtgcttgtctcactggccaggctgaggagcatggattcccccaagggcaggggagccccccaaagataaaagcagtaggtgactggatggtcagagccaaggggactaaggaccctgtgctatctctggttagtccaagctctctcccaagacagccagccagcagccgtgtcagtgggttgcagagcctcctggcctcacagcccatgttctggctcatccctcttctgttctccagtgactgatatctgtctccttccagagctccccagatcaaggtgagaccaagagcactcaggcaaacccaccagccaaaatgctcccacccaagcagcccatgtatgccatgccaggcctggcctccttcctgacgccgtcggacctgcaggccttccgcagtggggcctcccctgccagcctcgcccggacgctgggctccaagtctctgctgccaggcctcagtgcgtccccgccgccgccaccctccttcccgctcagccccacactgcaccagcagctgtcactgccccctcacgcccagggcgccctcctcagtccacctgttagcatgtccccagccccccagccccctgtcctgcccacccccatggcactccaggtgcagctggcgatgagcccctcacctccagggccacaggtaagcagggaagagcagaacagcccttctgtgaccgtgtggggaggggaagcggctttgccctttcaaaccctggccctgccactcaccagtgatataacctcagccttggcacctgacctctctgagcctcagttaccacatctaggaagtgggtctcgcacaccttacctgagatgtgctggctgcagtgaacagttcacgagttgccagactgactcttaggatactccagtccccccttcctgcatcctcagccctagccctggcccttcccaaagccttcgagaccttacccccgctaattgttccacagagattgctacgaggttcacatggcccttagaggtcattgggttcagtaattccattttacagatcgagaaactgaggcccagaaagggaaaggccctgaaagccaagtccttcagcccctgattcagccaagacaagggttgaacattttgaaaggtgctctactgggagcaaggcagcagccctggaggcagcatctctttggtgtggacacccttggacacatgggctctcaccccgggaggcctgggacagtctgccccctcatctctccttggctcatggcctcctccttcccactctgtaggacttcccgcacatctctgagttccccagcagctcgggatcctgctcacctggcccatccaaccccaccagcagcggggactgggacagcagctaccccagtggggagtgtggcatcagcacctgcaggttagtcctcgcccgtccctgcctttgtcctgccagccagggagagtgggaacaggatggccagggatgggagaatggccaagggcaacgtggacaggggaggaccctgcagtcactgtcagccctgctgaggggatcgatatctcagatgacaccgcagagccaggccccggaaggactctgctggcctgatgctgaggcctgcttgggaaactgactagtcttcagtcttgctgcttcttccttgctcctgtttttttcacaagtgcttccacgtgacattcacagatgagtcctgcatcttaggccagttccctagaagcagagcctgaggcagcagggattgggtgcctttggggatgcactggggaaagcttgcaggagaagggggtgagggaggcaggacagggtgggggaaggagctgaggggggatgtggcctcagctgaagacttgcttctgcctcatcccatgggagccctggagcatgaacggtgctagagtggctcccacctggaggtcagggaactggctttttgaacccttcatcagtcagcccttggctgtgggctgccccggggtgagtgtagcccactgggcagggcagctcccaagactagaacagctaagaatgcaggacaggggacctcggtgggacacggtgggagaagggacccactgtctatcccaaggaattacagacaccttagagaccccttctccctgcaccccagtgtcctccctagtcctcctgtgggcctcctgtctcaggcctctgttcctatcctgcactccacctttcaaacccatgctaacacctccctctagaaagtcttcctggatccacgccaccccaactctggggaagagtgacctttcaacaaccgcagccagcaggagagggagagtgcagtgaggagggacacttgctccttaacccgccagccaggttcccattcccttggcaaaaatgagtcccgcagccacacctgggggacgtagtgccaagcagctgtcccagcgatagcgccacaacctggaaggcacagcgcacttgtcgggtggccaccttgctgctgagaaacgctgcccccagccctagcctcggcctcccagcacacggctggttcctctgctgacccaccagcgcccttggacactgaacaagtgaccagcgcgcatgccccatttctgacatgcctgaagtgagattctacatgggtgggtggactcagctcagcaagaatcccttccctgcaccccaagcaggtgcagaccctcctaccccagccctttcctgtccctaagtttccttctcaaaagtcagaatacttagggtatgtaggggagtgtcacacaatgtccaagcctcctgaggcttgcccatcacatccagcatggaggtcagaccccagcagggccgtattttaaaaacataaaaagcacctgtcctcccttaattcagtttgagatttacaaattcctgtgattaaaaacccatgtgagagcaatggtgacatcggcgtgcgcctcgatgaaagacagacacgctactgccctttcacccagagctgaggaccgggtggtcccctgctgggtttccgggaggggtttggttctgcttggtgtagaggtgggtgggggtgggacttgcagatgcaagtccctcattcagccacagaggggcagctgaatccaggggtgggggtggggcgtacagtgcaggggtcctggtgctcccctggcccggagaggtacccaacagctttgacagcccctcctctctctcacagcctgctccccagggacaaatcgctctacctcacctaatcccgcctccctaccatccctgaggctcgctggaaggcactgctcagagcctgaagggctgacagcagaaaagaggccctggccagaggcagggtggcccatcggagagagcagtgacacacccattgcccgggggctgagtctcttcctcaacctcccaccagactctgcagaggcagcccactgcccaccaccagcccaaagaacctgcaggaaccttccgcccgctgacctgcttgctccagggtaactgtggaccctgtcctcgccctgcgcacggtaccctatgtctggacacccggccccagctccagccccagcccaggtgggccgcccctggcggggtcgcttaccaacggacacccaccccagatgcatgggccagagggccggcccccggcatagatgtgcacatcggttttccagtgtgaacaaaagattacgaaacctagaaactgttggttccgtgtaagtagttgactacgtgttttagaactgtgctgaagacatctgtaagactattttgtgggggaaaaaagtagtttcctttaaggtaaaaagcattttatatgatccttagcacatttttaagttttatcttaagggagacgcgcacaaaagcggctgccaaaccgtttcgtcatcctcacagcaaggaccggacgcttgctagccaccccggagcactgctctccttttaatcatgtattcatctattttaaattgccggcgacgacttttgtctatttatgaagaaaccttgagaacgaagttacagcttatcctaccgtgtgtgtggttttggggtttcgtttgggtttgggttcttgacgtcgtttgcagctgtttcctggccctggcgagtgtctgtcttggtgcccagtgcttctctcaaatctctttataataaaacttctgaaaagctgaaaacaagtctgtgtctccttgcccttggtgagccagggttgaaccccctaaagtggcatagagcccctcgggccagacggacacgggtcaaagtcttgcctgacctttaccagcccatgtgggtttgtgtgtgggtgatgggaccactctgacctcagtcttgccctctaagggggtaacagtggtcagacccgtagggctcttgcgacgatgagaaggggtgtgggcaagaacgccgccacacaggaacttgcatcagctggtgacagtggcgagcccttcctctggaggatggggccacccaggcttgtggaggtgagcagtgggaatccagggaggaggccaaggggtttttcaaacctgagtgtaggaagcatcccagacagggaattctttaaaccagatttcccagcagatgttagatggtgatactaacaacgacagcaaacaacaacaaaaggcaaataatagttgactgttttaactacatctggaaaaataccaattgcctggtgggaggctgcaactcttgcaccctgtgatgcagccattttgaggtggggacaggtgcccccgctcccagccaggctcgggacccagacagaggagcccccacactcaggacagctctcccagcctctcactctccaatcacggtaaaccccctccttccagatgacagcccaggagtggggtgcagtttccccactggagggcattttgtaatccactttagaaaaataaaataaccccaaaccagccacctgccgtcccgtcagcagcagcaccgcaatgtgcagcataaatatttcatgtggttacaatttccttttctatgtggggcttgtcagtaacacgacggcttagacagtttaatattcaactcttgcttccatgtttgtgaaaacagcatcactgggatccacgcagacagcccacaatgacaagagtacaaggccctccttgtacagtggtgctgaggcggaggcctgctgccacccctcacagctgcaccaggagctcaggagtcctttccaagcatccacacgccaagaccaccccctctaggctgcacgggacactcagaggccccaagcagaacctaagcgccctgcctgcaggtatcagggactgtcgcacgggtgtgttctggggcccagagagtgagaatagagcctaaaggccaatttcagggccatggagtggacagcgactgtcttagtccatcccagctgccataacagagtgccatgggccaggtggctcacagcaacacaaacttactgctcagttgtggaggctgggaggtctaagatcaaggcgctggcagcttcagtgtcaggtgagggttcacttgctggttcgtaaacgtccatcctctcgctgtgtccgacagggcaggaggggagggtgctctccagaattcaacagcactcaccccaatcctgagggctccgctcagtcaccttccaaaggccccgcctccaaatactggcccattgagggttaggattccaataatcaaattccgggaggacacaaccattcagtctgtagtgccgactgcagtagttggcactggtgtccccctctcgcctgtcctcttctgttgccagagcccatccccaggtcctgagtgccatcccagtcattgccccccagagctgccacagctaatgaccaaataatggagacgccaactctctggtcccattcacaacccgagtccacgggagcagcctgaagctgcctccagcggcaacaccatccttgctaagctccctccccccaccccgccctgctctgaggatgtgactccctcctgggagcacccactcagtaaatcgcttgaaccagaatccccatctcaggcccgtatgtttctaaggcaacagcctaccatactgactatgcccatggcccaagtggggccacatcggtattgctccaaatgtctctggctctggtcttacctgcaactacaagaatttcagccccgaaaccaccacccaagccccactccagggccttcctccttcttgggaggcagtgtctgctgcatgttttctattccatcctgcaatgatggtggccacgacccacagcgcctccaagaacccagggtcacaccggctgtgaaagcactggggtctctgccatgggctctctcactccccatccctgtgctcccaaagctgccagccctgggtgccccagccttgtcgtgggccaggttctccctgcagcatcctccacctgccggggccagtctacggtcggggcccctcacaccttgaggcttcaagttattgccagaccctagagcagtggccccaacagtgtgaacacctttaactcctacctgcagcctgcccccactgcccacagagctggcccagggagcaaccccactcacccttcccagggccaagcgccttcctcaggtttctccatctcacacctcccccaacaaactcatctcggtccaaacaggaggcaggacctgggccgaggctgagaccacgccccctcccccaaccccagaaggcagtcatggctggtcccaaaattgcccagtagtcattcctccttggagggatacacagaaatttttacactggattggaatgtgggcaacatggcacagattaattttttgattaattttcagagtccgcgatgctaaaattcgatacgttcattcagcaagaatacaaacaacagagcagctcttctctgccacacagcacatacgtatacatacatcagttagcgtggaattatctgttcttgaaagtttgaagtaactcccatgcgaaaaagatctgatgtgctgttatagattcaggagtttaaaaaaaattgttcaacccatcagttattaaccagctctgcttcccaaattacccaaaacgaataacctcaagcccaccaaacgctgaagggtagtcagtcagagtgagaggcagtgtcggggtggtggttaggagggagggctgggtcacagcctgcctgggagaatattcgcttggctgcctacaagttgtatgagctcaggcaagtttcttaacttctgtttcttcatgtctaacttggagataatagtctcctcttcaaagggctgttctagtaacaatgagttaatataggtaagtccttaaaatagtattatttctcattattatataataatacttaatctctgcaccaggtcaagtttcttgcatcgtgtactattcaggatgtgctaggctacgctgcagaaacaactcccatctcagcagcttaacccaacagagttgatccctccaagcctcctccaagccaccaagaacatttggggatccaaggttcttctctgtggtggctctgccacccccttcaccctcggagccctccctgagtcctctatagccagccagtggtgagtgagccggggatcctgcagaagcaggaaacgaagtggtgcctgtcactgcttcccgtttcctgatggccacagctagtcagcagggatgggaaatggaatcatcccagagaaggggtccccaacccctgggccagtctgtggcctgtcaggaaccgggccacacagcaggaggtgagcggtgggcgagcaagcattaccgcctgagccccacctcctgtcagatcaacagcagtattggattctcacaggagcgtgaaccctattgtgaactgcgcatgcgagttacatgctccttgtaagtaggttacacgctccttataagactctaactaatgcctgatgacctgaggtgcaacagtttcatcccaaaaccatctccccgccgcctgccagccatgggaaagttgtcttccatgaaactggtcactggtgccaaaaaagttggggaccactgtcctagaggaaacgtgccctgggggaaaaatgcaagttcatggaactcacagtgatgctttcgccgaatatcacaacacattttcaggggaggaacatgttgcccagagaggccaaggtacttgctggaggtcacataatttgcatgaagccaagaattaaaatgacctcagaccccacatctctccttttccaaatttcctctacttgcacgtaggaagcaaaactccaggagggaagagagctcaggcactaaagccctgcgggtttgacttgcaaaaagcacccagatcatcactttacacacaaccccagcaactttatcttccagcctttagcatatgaaggaagtcagcaaaaaactgtctgctagaggcgggcacaccaaaagccatgagaagcaatgctgggcaagggaaggagatataagaactcaaacttagcggtctggggacatttggtgcaggatcaaacagtcctgtgcacaccggctgtccctgcaggcatcatctaacatgcttgtaattttttcttaggtttcaacatgtatagggggacatgcatgagttacgagacacatttatttctgcaaaatggccgtatcctggcaaagtggaccagatgacctgtcattgtcctttgaatgaaggacaaagatgatgacattggaagactttccacttggagatctggtttcctcatatgcaaaaccttatggtaatagctatggctcagcctactgattaaatgagacagtatgtgtgaattgcctgggacaatttgatataataaatgttgtttgcttatctttctctaggtcttgctttccttatctgaaaaatgggaatactattaccattcccagaggacacttgttgggattgaaaatgatggcatatttgtagaggtctgactcataacgactcacattctcatgttttattatgtgtgttttttaagaacctgggcctgagagtgaagagagcagtgtcacccttaatctctccggtccccgtttcactctgcctgcagggcgcaagctttgcttctctcctccccaatcttgctactgctaacagaaggtgcagccacccgccacccacctgcccatctctctgccagcctggccttgcctgtgtttgaccttctgccttagagctctgcttccaagtggaggaaggctgccttccagaggtttctattaagtacaaaaacaggacagttggcattcattcagcaagcatttaatgaactcctattaagtgccagctgctgtggcaaagtgacaagtgacacagaccaggcaggtctccagccttctggacttcaggatagcaggagaaataagccctaaacaaggacacgcgcaggcgcagagaagacttccgattgtgaggctgctgagaagggccaaaaatcgctgctatgagcaagaataaaaggaggcctgtcttagatggggagaaggtggggaagaaaggccttttgaggaagtaccctggaggcccggcccagcctgcagtcattttcttgcaggggtcagaggtgtggacgcacacggggtgctgaccagggaggagctgctgtccatccttctcatgagctccagggatgagtgtgaggggacaggggcagggaggtgatgtgtggccccactgcgaatcaacccctgccacgcttacaccctctctttctcctccatggggatccctggtcaccctcctgggcaacaggaaagattccagtcaacattttcttacacaaatatgctaatgaataaacaggaagtgtgagatggtgacaagataggatagggtgacatgacgggggacagcggacaggtagtgtgtggcatctcagagagggaacagggacaggtagcgtgcggcacctcagagagggaatggagctggctgttgagcggagacctgaaggaagcaaagaacaggtaaggacagtatcagaacggagttcctggcagaagaacgggcacacagacgtctggggtgggaagacgctggcttgctctgaaataacaaggaaaccagtgttgcctgcggaaatggccaaaggggaacatggcatgattttgagaagccggcaggagcctggccaggccgcaagaggagtttagactgtgttgtaagaacaacgggaagtcatctaagtttaggagaggcatggcccaaatggcagttttacaggacccctctggcggttgagagggaaggggatggcaggggtggaggagtggacgtgggaagatttgtcaggaggctgcacagtcatccaggggagaggaggtggcgacgttagacaagggtggtgacagtgaaggacaggaatcccaattgccacgatgcagaatgccactggaaactggatatgtactcacgggcgccatgagcgagagcgctggctgaggagccgcagtcctcaagtcagagcctcagccctggggcctacgccactatgcatttgccacgtgactgttgtgccccctgtacccaagaccgaggctgactttgaggcataggaagggaatcagaggacagaaatgagctttctgaagtgcaagtgcaaagcagtttaaagaaaccactttgaagaagttccaatcaacagaggagccagctgtgatttcactgttgccttatgccgtggactgtattgtgtctccccaaaatttgtatgttgaagcactgaccttcaaggcgatggtatctggagatggggcctttggtaggtgacaggttgagaagaggtcacgagggtagagtcctcatgatgggatcagtgtcccaagaggagacaccagacaccccccccccccccgccacctaccaggtgaggacacagagagaaggcagccatcgtcaagccaggaagggctctcaccagaaaccagccatgcgggtgccttgatcatggactttccagcctccagaactgcgagaaaacaaatttctgttgcttgagccacccagtctgtaatgttttgttagggcagcctgagctaagatgccctgagcattagaaagggccctagggggacaagaaaaggggacttggacctggcagtgtaaaaattgcgctggtggtgccctgcacaggcctttcacacagttttaaaatagcaagtaacatctacgtgggtgtaagggtgctaattttcaacgtccttgacttcaactttaaaactttaataatataattgtggccaggtgcagtggctcatgcctgtaatcccagcactttgggaggccaaggcgggccgatcacctgaggtcgggagttcaagaccagcctgaccaacatgaagaaaccctgtctctactaaaaatacaaaattagccggaatggtggtgcatgcctgtaatcccagctactcgggaggttgaggcaggagagtcgcttgaacccaggaggcagaggttgcagtgagccaagatctcactgttgcactccagcctgggcaagaagagtgtaactccatttcaaaaaaaaaaaaaaaagaaaaaaaaaaccactttaataatataatcaatccttggtatctacaggggattggttccaggaccttctacagataccaaaatccacagatgctcaagtctcctatacaaaatggcatagaatttgcaaataacctatgcatatcttcctgtgtacttgaaatcatctctagattactgataacatctaatccaatataactgctatgtaaatagttgttatactgttttggctttatttatattaatttttactgttgtacttttaaaaaatatatgtttgatctgtggtaggttgaatccatcatgcagaacccacggatatggaagactgaccacatatccctgccttaaaaagtcaaaccaggccgggcatggtggctcatgcctgtaatcccaacactttgggaggccaaggtgggcagatcacgaggtcaggagatcgagaccatcctggctaatgcggtgaaatcccgtctctactaaaaaaaaaaaaatacaaaaaattaacctggtgtggtggcaggtacctgtatagtctcagctactcgggaggctgaggcagaagaatagcgtgaacccgggaggtggagcttgcagtgagccgagattgcaccactgcattccagcctgggggacagagcaaaactccgtctcaaacaaaaacaaaaaacaaaagtcaaaccagaccatgaagcttataatgatgtcagggtgtcctctgctcttccctccttcaatctctgattctcaccacctagggataaatattctcaactctttttgttatttaacaactgaatatgcacacactgctatttcttgatttatagattttttttcttttttctgagatggagtctcactctgtcacccaggctggagtgcaatggtgcaatcttggctcactgcaacctccgcctcccgggttcaagcaattctcctgcctcagcctcccaagtagctgggactacaggcatgcgccaccacggctggctaatttttagtatttttagtagagacgggtttcacagctttagccaggatggtctcaatctcctgaccttgtgatccgcccacctcggcctcccaaagtgctaggactacaggcgtgagcctagccgatttttaaatgccttttagtcacttcttttcatggaaaaagaggatttagtgctcctcctccatcttgcttccccctgtgtcctcccagtgaactacataatcatggtggttaatcaatattccaggcttacattattcctattctgtaactcatgtttgctgatgggtcaagctacatatttttttccttgaataatttttcatttttgtttttcgtgtgcttaattttcctccctgtcactcattttcccccaaagctcagagctgtaaaccccttctgattatggccagacactttgtgctccaatttgatctctttctcaggcagattccagccatcatcagatgcttccttttattacttagcaaatccccttgcttttctctatcatgggtcctctctttgcaggattccatccattcctccttcctatcttgcttcttcattgtggtggaacacatcttccaggccctttctaagaaaggatggatgagaaataaaggtgcagttctgcaaatgttttcatcttaccctcacacttgattggtggtttggctgggtaaagacatctaggctgaaaataactttctctctgaattttgaaggcacggcttcattgacttctcatttccagccttgctgctgttgagcgttgaatattattctgcctcccatttctttgtatactgcttactttttgcccccttctctggtaacttttagattttctcttcatccaccatgtcttgaaatctcacagggatttaggtgggtcttccctggctttgcgggtggtaggtggacccttccaatctgaagagagccagactgcatctccccttccagcttcctcttactcctagaccatctttttgaatttagaaaccaagaatttggcttctttatgctctcatctatgaagaagtggttttcatcactaatagtaagagtgtaacaaacgaagcacattcattaattcctccacacacgtgtcttccacaggggagtggggagtaggagggtggtctccaagctccttcctcctcccctgtcaggctggctttttatttttatttttttttttttgagacagggtcttactctgttacccaggctggagtgcagtgacgccatctcagctcactgcagctgcaacctcctgggctccagcgatctccacacctaagcctcccgagtagcggagactacagacacgtatcaccacacctggctaatttttgtagagacagggtctcactatgttggccaggctggtcttgaactcctgagctcaagcgatcctcccgtctcggcctcccaaagtgctgggatcacatgcatgagctacagtgccctgcgaggccggctgttgaccacacttacatcctcaactccgcccacctttgatggacagcatattagtcagcctgggctgccataacaacagaaatggtttaaacaacagaaattaattttctca

SEQ ID NO: 3086 - DNA, 2592 bp, Homo sapiens
gccgccgcgcccgccatggacgtccgcctgtacccctcggcgcccgcggtgggcgcgcggcccggggccgagccggccggcctggcgcacctggactattaccacggcggcaaggtgttgcctgaggctccactgaagctatggcataatttgcagaatttgcacttcattacttttctgaaattcaaacaaattctgaaactgcacgagttctggctgagagctgtggatctgtgcattttgatggtgacagtgcctacgtggggatgagtgacggaaacccagagctcctgtcaaccagccagacctacaacggccagagcgagaacaacgaagactatgagatccccccgataacacctcccaacctcccggagccatccctcctgcacctgggggaccacgaagccagctaccactcgctgtgccacggcctcacccccaacggtctgctccctgcctactcctatcaggccatggacctcccagccatcatggtgtccaacatgctagcacaggacagccacctgctgtcgggccagctgcccacgatccaggagatggtccactcggaagtggctgcctatgactcgggccggcccgggcccctgctgggtcgcccggcaatgctggccagccacatgagtgccctcagccagtcccagctcatctcgcagatgggcatccggagcagcatcgcccacagctccccatcaccgccggggagcaagtcagcgaccccctctccctccagctccactcaggaagaggagtcggaagtgcatttcaagatctcgggagaaaagagaccttcagccgacccaggaaaaaaggccaagaacccgaagaagaagaaaaagaaggaccccaatgagccgcagaagcctgtgtcggcctacgcactcttcttcagagacactcaggccgccatcaagggtcagaaccccagtgccactttcggtgacgtgtccaaaatcgtggcctccatgtgggacagcctgggagaggaacagaagcaggcctacaagaggaagacagaagcagcaaagaaggaatatctgaaggccctggcagcctaccgggctagcctcgtctccaagagctccccagatcaaggtgagaccaagagcactcaggcaaacccaccagccaaaatgctcccacccaagcagcccatgtatgccatgccaggcctggcctccttcctgacgccgtcggacctgcaggccttccgcagtggggcctcccctgccagcctcgcccggacgctgggctccaagtctctgctgccaggcctcagtgcgtccccgccgccgccaccctccttcccgctcagccccacactgcaccagcagctgtcactgccccctcacgcccagggcgccctcctcagtccacctgttagcatgtccccagccccccagccccctgtcctgcccacccccatggcactccaggtgcagctggcgatgagcccctcacctccagggccacaggacttcccgcacatctctgagttccccagcagctcgggatcctgctcacctggcccatccaaccccaccagcagcggggactgggacagcagctaccccagtggggagtgtggcatcagcacctgcagcctgctccccagggacaaatcgctctacctcacctaatcccgcctccctaccatccctgaggctcgctggaaggcactgctcagagcctgaagggctgacagcagaaaagaggccctggccagaggcagggtggcccatcggagagagcagtgacacacccattgcccgggggctgagtctcttcctcaacctcccaccagactctgcagaggcagcccactgcccaccaccagcccaaagaacctgcaggaaccttccgcccgctgacctgcttgctccagggtaactgtggaccctgtcctcgccctgcgcacggtaccctatgtctggacacccggccccagctccagccccagcccaggtgggccgcccctggcggggtcgcttaccaacggacacccaccccagatgcatgggccagagggccggcccccggcatagatgtgcacatcggttttccagtgtgaacaaaagattacgaaacctagaaactgttggttccgtgtaagtagttgactacgtgttttagaactgtgctgaagacatctgtaagactattttgtgggggaaaaaagtagtttcctttaaggtaaaaagcattttatatgatccttagcacatttttaagttttatcttaagggagacgcgcacaaaagcggctgccaaaccgtttcgtcatcctcacagcaaggaccggacgcttgctagccaccccggagcactgctctccttttaatcatgtattcatctattttaaattgccggcgacgacttttgtctatttatgaagaaaccttgagaacgaagttacagcttatcctaccgtgtgtgtggttttggggtttcgtttgggtttgggttcttgacgtcgtttgcagctgtttcctggccctggcgagtgtctgtcttggtgcccagtgcttctctcaaatctctttataataaaacttctgaaaagctgaaaac

SEQ ID NO: 3087 - protein, 456 aa, Homo sapiens
MSDGNPELLSTSQTYNGQSENNEDYEIPPITPPNLPEPSLLHLGDHEASYHSLCHGLTPNGLLPAYSYQAMDLPAIMVSNMLAQDSHLLSGQLPTIQEMVHSEVAAYDSGRPGPLLGRPAMLASHMSALSQSQLISQMGIRSSIAHSSPSPPGSKSATPSPSSSTQEEESEVHFKISGEKRPSADPGKKAKNPKKKKKKDPNEPQKPVSAYALFFRDTQAAIKGQNPSATFGDVSKIVASMWDSLGEEQKQAYKRKTEAAKKEYLKAAYRASLVSKSSPDQGETKSTQANPPAKMLPPKQPMYAMPGLASFLTPSDLQAFRSGDASLARTLGSKSLLPGLSDPPPPSFPLSPTLHQQLSLPPHAQGALLSPPVSMSPAPQPPVLPTPMALQVQLAMSPSPPGPQDFPHEFPSSSGSCSPGPSNPTSSGDWDSSYPSGECGISTCSLLPRDKSLYLT

SEQ ID NO: 3088 - DNA, 2476 bp, Homo sapiens
gccgccgccgccgccgcgcccgccatggacgtccgcctgtacccctcggcgcccgcggtgggcgcgcggcccggggccgagccggccggcctggcgcacctggactattaccacggcggcaagtttgatggtgacagtgcctacgtggggatgagtgacggaaacccagagctcctgtcaaccagccagacctacaacggccagagcgagaacaacgaagactatgagatccccccgataacacctcccaacctcccggagccatccctcctgcacctgggggaccacgaagccagctaccactcgctgtgccacggcctcacccccaacggtctgctccctgcctactcctatcaggccatggacctcccagccatcatggtgtccaacatgctagcacaggacagccacctgctgtcgggccagctgcccacgatccaggagatggtccactcggaagtggctgcctatgactcgggccggcccgggcccctgctgggtcgcccggcaatgctggccagccacatgagtgccctcagccagtcccagctcatctcgcagatgggcatccggagcagcatcgcccacagctccccatcaccgccggggagcaagtcagcgaccccctctccctccagctccactcaggaagaggagtcggaagtgcatttcaagatctcgggagaaaagagaccttcagccgacccaggaaaaaaggccaagaacccgaagaagaagaaaaagaaggaccccaatgagccgcagaagcctgtgtcggcctacgcactcttcttcagagacactcaggccgccatcaagggtcagaaccccagtgccactttcggtgacgtgtccaaaatcgtggcctccatgtgggacagcctgggagaggaacagaagcaggcctacaagaggaagacagaagcagcaaagaaggaatatctgaaggccctggcagcctaccgggctagcctcgtctccaagagctccccagatcaaggtgagaccaagagcactcaggcaaacccaccagccaaaatgctcccacccaagcagcccatgtatgccatgccaggcctggcctccttcctgacgccgtcggacctgcaggccttccgcagtggggcctcccctgccagcctcgcccggacgctgggctccaagtctctgctgccaggcctcagtgcgtccccgccgccgccaccctccttcccgctcagccccacactgcaccagcagctgtcactgccccctcacgcccagggcgccctcctcagtccacctgttagcatgtccccagccccccagccccctgtcctgcccacccccatggcactccaggtgcagctggcgatgagcccctcacctccagggccacaggacttcccgcacatctctgagttccccagcagctcgggatcctgctcacctggcccatccaaccccaccagcagcggggactgggacagcagctaccccagtggggagtgtggcatcagcacctgcagcctgctccccagggacaaatcgctctacctcacctaatcccgcctccctaccatccctgaggctcgctggaaggcactgctcagagcctgaagggctgacagcagaaaagaggccctggccagaggcagggtggcccatcggagagagcagtgacacacccattgcccgggggctgagtctcttcctcaacctcccaccagactctgcagaggcagcccactgcccaccaccagcccaaagaacctgcaggaaccttccgcccgctgacctgcttgctccagggtaactgtggaccctgtcctcgccctgcgcacggtaccctatgtctggacacccggccccagctccagccccagcccaggtgggccgcccctggcggggtcgcttaccaacggacacccaccccagatgcatgggccagagggccggcccccggcatagatgtgcacatcggttttccagtgtgaacaaaagattacgaaacctagaaactgttggttccgtgtaagtagttgactacgtgttttagaactgtgctgaagacatctgtaagactattttgtgggggaaaaaagtagtttcctttaaggtaaaaagcattttatatgatccttagcacatttttaagttttatcttaagggagacgcgcacaaaagcggctgccaaaccgtttcgtcatcctcacagcaaggaccggacgcttgctagccaccccggagcactgctctccttttaatcatgtattcatctattttaaattgccggcgacgacttttgtctatttatgaagaaaccttgagaacgaagttacagcttatcctaccgtgtgtgtggttttggggtttcgtttgggtttgggttcttgacgtcgtttgcagctgtttcctggccctggcgagtgtctgtcttggtgcccagtgcttctctcaaatctctttataataaaacttctgaaaagctgaaaac

SEQ ID NO: 3089 - protein, 498 aa, Homo sapiens
MDVRLYPSAPAVGARPGAEPAGLAHLDYYHGGKFDGDSAYVGMSDGNPELLSTSQTYNGQSENNEDYEIPPITPPNLPEPSLLHLGDHEASYHSLCHGLTPNGLLPAYSYQAMDLPAIMVSNMLAQDSHLLSGQLPTIQEMVHSEVAAYDSGRPGPLLGRPAMLASHMSALSQSQLISQMGIRSSIAHSSPSPPGSKSATPSPSSSTQEEESEVHFKISGEKRPSADPGKKAKNPKKKKKKDPNEPQKPVSAYALFFRDTQAAIKGQNPSATFGDVSKIVASMWDSLGEEQKQAYKRKTEAAKKEYLKAAYRASLVSKSSPDQGETKSTQANPPAKMLPPKQPMYAMPGLASFLTPSDLQAFRSGDASLARTLGSKSLLPGLSDPPPPSFPLSPTLHQQLSLPPHAQGALLSPPVSMSPAPQPPVLPTPMALQVQLAMSPSPPGPQDFPHEFPSSSGSCSPGPSNPTSSGDWDSSYPSGECGISTCSLLPRDKSLYLT

SEQ ID NO: 3090 - DNA, 2398 bp, Homo sapiens
atgcagcagactcgcacagaggctgtcgcgggcgcgttctctcgctgcctgggcttctgtggaatgagactcgggctccttctacttgcaagacactggtgcattgcaggtgtgtttccgcagaagtttgatggtgacagtgcctacgtggggatgagtgacggaaacccagagctcctgtcaaccagccagacctacaacggccagagcgagaacaacgaagactatgagatccccccgataacacctcccaacctcccggagccatccctcctgcacctgggggaccacgaagccagctaccactcgctgtgccacggcctcacccccaacggtctgctccctgcctactcctatcaggccatggacctcccagccatcatggtgtccaacatgctagcacaggacagccacctgctgtcgggccagctgcccacgatccaggagatggtccactcggaagtggctgcctatgactcgggccggcccgggcccctgctgggtcgcccggcaatgctggccagccacatgagtgccctcagccagtcccagctcatctcgcagatgggcatccggagcagcatcgcccacagctccccatcaccgccggggagcaagtcagcgaccccctctccctccagctccactcaggaagaggagtcggaagtgcatttcaagatctcgggagaaaagagaccttcagccgacccaggaaaaaaggccaagaacccgaagaagaagaaaaagaaggaccccaatgagccgcagaagcctgtgtcggcctacgcactcttcttcagagacactcaggccgccatcaagggtcagaaccccagtgccactttcggtgacgtgtccaaaatcgtggcctccatgtgggacagcctgggagaggaacagaagcagagctccccagatcaaggtgagaccaagagcactcaggcaaacccaccagccaaaatgctcccacccaagcagcccatgtatgccatgccaggcctggcctccttcctgacgccgtcggacctgcaggccttccgcagtggggcctcccctgccagcctcgcccggacgctgggctccaagtctctgctgccaggcctcagtgcgtccccgccgccgccaccctccttcccgctcagccccacactgcaccagcagctgtcactgccccctcacgcccagggcgccctcctcagtccacctgttagcatgtccccagccccccagccccctgtcctgcccacccccatggcactccaggtgcagctggcgatgagcccctcacctccagggccacaggacttcccgcacatctctgagttccccagcagctcgggatcctgctcacctggcccatccaaccccaccagcagcggggactgggacagcagctaccccagtggggagtgtggcatcagcacctgcagcctgctccccagggacaaatcgctctacctcacctaatcccgcctccctaccatccctgaggctcgctggaaggcactgctcagagcctgaagggctgacagcagaaaagaggccctggccagaggcagggtggcccatcggagagagcagtgacacacccattgcccgggggctgagtctcttcctcaacctcccaccagactctgcagaggcagcccactgcccaccaccagcccaaagaacctgcaggaaccttccgcccgctgacctgcttgctccagggtaactgtggaccctgtcctcgccctgcgcacggtaccctatgtctggacacccggccccagctccagccccagcccaggtgggccgcccctggcggggtcgcttaccaacggacacccaccccagatgcatgggccagagggccggcccccggcatagatgtgcacatcggttttccagtgtgaacaaaagattacgaaacctagaaactgttggttccgtgtaagtagttgactacgtgttttagaactgtgctgaagacatctgtaagactattttgtgggggaaaaaagtagtttcctttaaggtaaaaagcattttatatgatccttagcacatttttaagttttatcttaagggagacgcgcacaaaagcggctgccaaaccgtttcgtcatcctcacagcaaggaccggacgcttgctagccaccccggagcactgctctccttttaatcatgtattcatctattttaaattgccggcgacgacttttgtctatttatgaagaaaccttgagaacgaagttacagcttatcctaccgtgtgtgtggttttggggtttcgtttgggtttgggttcttgacgtcgtttgcagctgtttcctggccctggcgagtgtctgtcttggtgcccagtgcttctctcaaatctctttataataaaacttctgaaaagctgaaaac

SEQ ID NO: 3091 - protein, 482 aa, Homo sapiens
MQQTRTEAVAGAFSRCLGFCGMRLGLLLLARHWCIAGVFPQKFDGDSAYVGMSDGNPELLSTSQTYNGQSENNEDYEIPPITPPNLPEPSLLHLGDHEASYHSLCHGLTPNGLLPAYSYQAMDLPAIMVSNMLAQDSHLLSGQLPTIQEMVHSEVAAYDSGRPGPLLGRPAMLASHMSALSQSQLISQMGIRSSIAHSSPSPPGSKSATPSPSSSTQEEESEVHFKISGEKRPSADPGKKAKNPKKKKKKDPNEPQKPVSAYALFFRDTQAAIKGQNPSATFGDVSKIVASMWDSLGEEQKQSSPDQGETKSTQANPPAKMLPPKQPMYAMPGLASFLTPSDLQAFRSGDASLARTLGSKSLLPGLSDPPPPSFPLSPTLHQQLSLPPHAQGALLSPPVSMSPAPQPPVLPTPMALQVQLAMSPSPPGPQDFPHEFPSSSGSCSPGPSNPTSSGDWDSSYPSGECGISTCSLLPRDKSLYLT

SEQ ID NO: 3092 - DNA, 2520 bp, Homo sapiens
cgcagccctggcgcagacgcgtgggctccgtggcgatgcggggtgttgcctgaggctccactgaagctatggcataatttgcagaatttgcacttcattacttttctgaaattcaaacaaattctgaaactgcacgagttctggctgagagctgtggatctgtgcattttgatggtgacagtgcctacgtggggatgagtgacggaaacccagagctcctgtcaaccagccagacctacaacggccagagcgagaacaacgaagactatgagatccccccgataacacctcccaacctcccggagccatccctcctgcacctgggggaccacgaagccagctaccactcgctgtgccacggcctcacccccaacggtctgctccctgcctactcctatcaggccatggacctcccagccatcatggtgtccaacatgctagcacaggacagccacctgctgtcgggccagctgcccacgatccaggagatggtccactcggaagtggctgcctatgactcgggccggcccgggcccctgctgggtcgcccggcaatgctggccagccacatgagtgccctcagccagtcccagctcatctcgcagatgggcatccggagcagcatcgcccacagctccccatcaccgccggggagcaagtcagcgaccccctctccctccagctccactcaggaagaggagtcggaagtgcatttcaagatctcgggagaaaagagaccttcagccgacccaggaaaaaaggccaagaacccgaagaagaagaaaaagaaggaccccaatgagccgcagaagcctgtgtcggcctacgcactcttcttcagagacactcaggccgccatcaagggtcagaaccccagtgccactttcggtgacgtgtccaaaatcgtggcctccatgtgggacagcctgggagaggaacagaagcaggcctacaagaggaagacagaagcagcaaagaaggaatatctgaaggccctggcagcctaccgggctagcctcgtctccaagagctccccagatcaaggtgagaccaagagcactcaggcaaacccaccagccaaaatgctcccacccaagcagcccatgtatgccatgccaggcctggcctccttcctgacgccgtcggacctgcaggccttccgcagtggggcctcccctgccagcctcgcccggacgctgggctccaagtctctgctgccaggcctcagtgcgtccccgccgccgccaccctccttcccgctcagccccacactgcaccagcagctgtcactgccccctcacgcccagggcgccctcctcagtccacctgttagcatgtccccagccccccagccccctgtcctgcccacccccatggcactccaggtgcagctggcgatgagcccctcacctccagggccacaggacttcccgcacatctctgagttccccagcagctcgggatcctgctcacctggcccatccaaccccaccagcagcggggactgggacagcagctaccccagtggggagtgtggcatcagcacctgcagcctgctccccagggacaaatcgctctacctcacctaatcccgcctccctaccatccctgaggctcgctggaaggcactgctcagagcctgaagggctgacagcagaaaagaggccctggccagaggcagggtggcccatcggagagagcagtgacacacccattgcccgggggctgagtctcttcctcaacctcccaccagactctgcagaggcagcccactgcccaccaccagcccaaagaacctgcaggaaccttccgcccgctgacctgcttgctccagggtaactgtggaccctgtcctcgccctgcgcacggtaccctatgtctggacacccggccccagctccagccccagcccaggtgggccgcccctggcggggtcgcttaccaacggacacccaccccagatgcatgggccagagggccggcccccggcatagatgtgcacatcggttttccagtgtgaacaaaagattacgaaacctagaaactgttggttccgtgtaagtagttgactacgtgttttagaactgtgctgaagacatctgtaagactattttgtgggggaaaaaagtagtttcctttaaggtaaaaagcattttatatgatccttagcacatttttaagttttatcttaagggagacgcgcacaaaagcggctgccaaaccgtttcgtcatcctcacagcaaggaccggacgcttgctagccaccccggagcactgctctccttttaatcatgtattcatctattttaaattgccggcgacgacttttgtctatttatgaagaaaccttgagaacgaagttacagcttatcctaccgtgtgtgtggttttggggtttcgtttgggtttgggttcttgacgtcgtttgcagctgtttcctggccctggcgagtgtctgtcttggtgcccagtgcttctctcaaatctctttataataaaacttctgaaaagctgaaaac

SEQ ID NO: 3093 - protein, 456 aa, Homo sapiens; identical to SEQ ID NO: 3087

SEQ ID NO: 3094 - DNA, 50606 bp, Mus musculus
  misc_feature (1)...(50606): n = A, C, G, or T/U
ctgggatgacaacctacctttggtggccaggttggggagcggatgcaaaagccataattatgggtttctttctttctttgggtgcctggaggaagtggctctagtagggtggagacttcctggcgtaactccctgcccacccatccacccctgcctacagtggccagccaggggtctctttgctcagagggacactgggttctggtggccttctttccacagacgccactcatgtccagactttgagtttttcacaaatcaattctttgtttagaaaacagagagccctggcctgtcaccaccctggttccagccctggctttggccactaacagtcctggcccttccgagtcccctccacttgtcttggtttccgtttctccgactgtataaagggaagagcagaagggatctggcactatgttggcccagtggatgataatgtttcttgattacatgacaccccttcccttaggccaccttggagctggacattaggacaggttagtgatccttcctgaagtggagtcaaggaagccacatagcttctgtttgagactaaacttcctggtccatgatgtgtggcttagatgcagcttggagcagaggtggttcagtcacttgttcccatcccacaagatgttctgagcattaacagagttcagaagagaagtaggttttatgagctcactggaagctgctgttagaggaaaatagaagggggaggggggctcagcccaacctgccggctgtggctgcgtgtaagacatgctgtactctcgtcatttgtacttctcggtccagacccatccatccacccatccatctccactcatctcttcttgtagcaacttcttattgctaggcactcttccgggtgttgcgaatccatcaatactcaaggcaaacttgtggagagccagggtgtgcagaagaaacaacagccagtaatacacaaatgcctggcagaccatcaaggacgttctgagtaccttgatgggagaggtttttttctgtcagcagagaccacattgaagcagagccctaaaaaaaaggaaggcatgggggtgttggaggcctgcctggccccttccctcttcctcctgcttaagtgacactagccacttgtcaccagcccattgccttacgtgcccatgccagctgttctatcctgtgatagaattttttttcttttttttaattaggtattttcctcgtttacattttcaatgctatcccaaaggtcccccatacccacccccccaatcccctatccacccactccccctttttggccctggcattcccctgtactggggcatataaagtttgcaagtccaatgggcctctctttgcagtgatggccgactaggccatcttttgatacatacagaattttttttaaagaaaattgagtcacgaagatgcgaactttgcctggggtcatgtaataagtagcccagcctagattaactgtcttggctcagattttggcttccactacactaaggaggcaagactagaaggggctttggtctgctaatccctccatggccctctctggctctctggaatcttctcagcaaagaaagtgactctaaggtcccagggagggttaagagagaactccccagtggactcttctttcagcctcggccacaaactgggaactaggtcactgtgcttgggaacagcctggaggagatgcggcagggttcacctgtctgtcttgcaggtctctgtctcccttgcccagggtttccaaagcatgaacaccaatctggggtgaaaattcagaggacagagaaagagaatgtcagggaattccctcagccattcacccttcactgtgcttagctcaaatccccctgttggcccctgatggcccctcttggatccacaattccaaacctagcccaggcatgcataagaggcccacatttggtgctgggagcctttggcagctgagatcccagacagaagactctagaggtgtgctctgccacaggctgagtgcctgtccttggctctgccacaggctgagtgcctgtccttggctctgccacaggctgagtgcctgtccttggctctgccacaggacttactcgctggagagcacctgcagcatcccggtagcagatggcagagttcagggatggggagcaaacaagacaggaagtcttcaccttccagtctctgatgctcagccccagcacagtcaggaggggtgggttccacatttttatccccaagtgttctccctggggataaattctctgtgtgttgtcccttcagaagcagagcctccttagtttagcccaactttccattccagggagctggctatgacctgggacggtgcttcttagaaatctggtcttaaatcctatcacaagagatattgtgatggcttctgtgtactggaactgaaagaaacctgagatgcctgtagccagctccagccacacccagatgtctaggtctcctgtgtgctgagacgggaacaaggggtcccttagaagtgaactgctgtgcagcccacatgatccatgagaggaagcagcagacagtggtgacttgcagcctataatttggcatcacagtcatctctgtgtctggctaacccttcactctccactgaggtccagaacattgtggttctgctctgccgagggtaccagtgaatgaagtgaagagtgacatgaagctctctgtccttgccactgaagggggctctgggttcctgcagcctcacaaacctaaagtcaagagacctgaactcaagtttaacctctggctgcaagcccctcactcttcctggctttgcctcctgctcaatatagtgagactggggacaaagagagatggagggaccaggagaatctcctctgtctggagaaacagggtaccagtttagatctccctgagaggagatggagggagagaagaataacctgtagagacgttcgccttttccttctcttctgataacatgcgctcccctactcagcccctaggaaagcttcatgagtctcttccagaaagacctgaattccagaaggttctagcacagcacagcacccagggtcaggcttcctcgagctgcaggaatttcccatgcttaacctataagtagactgcccgggttgcccccagcaacagctctggcattcacactggggtcctcaaaagccctggccccaggcctctgggcgtggcctgctctgtgacccagaccacccggtgggggaggggaggaaaggagggataagatagaagggtagcttctttcccagaggccttcctggggtacatttcagtgccacctaatcgggacaaactgcagaagacttgtggatagtgccacctgctggccacagaatgtaactgcacctgactgcttaagcccaggactattaaactgagatgaccatccagagttaaaacaaacaaacaaacaaacaaacaaacaaacataacactgcagtatgggggaggaacttgccttcaaaccaccattactatggactttttgaccttgacagagttgacctctatccactatcccagcattcacggagcaaagagattttgactttctagccagcctgggctacatgatgagacaccatctcttcaaacaaagcctaacacctattcccatttaaagagcctctgcctctttaaatgggaataggtggggccttggaggaggtgtggccttgttggaagaggtgtggtctggttgaaggggtgtggtcttgttggaagaggtgtgtcactgggggtaggttttgaggtttcaaaagcccataccaggcccagtgtctgtctgcctgcctgtctgtctgtctctctctctctctgcctgctacctgcagatcaggatgtaaacctgttccattgctttctactacaatgacaatggactagaactgtacatctgtaagcaagacctcagttaaacgcttcctttcataagttactttggtcatggtgtctcttcacagcactagagcagtactgaagacagtacccaaaattagaaatcaacaaggacttttaatcagtgctgccactgggtgatagtttggagtgcccattcctccaaccgtggtcaaagaactcagggttcctgttctagatacacaaagatgaagcgggttgtgatggtttgtgcttgccaacttaacacaaaccacagtcatttgggaaacagaacctctagtgaggaattgcctccataaacgtggctggctagcatgtctgattgatatgggagggccctgacttctgtgggtatcactactcctggtgtccctgcattgtataagaaagcaagctgagcaaatcacgggaattaagtcagtaagcagtgttgcctgcaggttcctgcctcgagttcctgcccaggctacccttgaagatagtttgtaacctgtaaaggggggggggggtaaccctctcctccacaagttgctttcagtcatgaaacatcatgactagtaactatgttactagaagatactatgttactaatagataatagtaacataactagaatcgtagtaacagagaagctgccttgggtctcgggaccatgtgacaaagacctctgggaaatctgtctgcagaaggtaccctgatgctgtcccacagagaatggtacacctacaaaatttgtttcttatgatacaagcccacattaatttcaggtgaatcaaatgactacagaaaacatgagcatattatgggactcggtgcactgacagagcttgtatagggaattcttttcttttctttttttttttaatttatatattatatttatataagtacactgtagctgttttcagacataccagaagagggcatcagattctattacggatggttgtgagccaccgtgtggttgctgggaattgaactcaggacccctggaagagcaatcagtgatcttaaccactgagccatctctccagcccagggagttattttctaagtactcttacattgtcgaaaccactaagagtcatattcacaactagaatttagttgtaaaattttaagccatagccaggcagtggtggtgcacacctttaatctcagcacttgggaggcagaggcaggcagatttctgagtttgaggacagcctgctctacagagtgagttccgggacagtcagggctacacagagaaaccctgtctcaaaaaaaaaaaaaaaaaaaaaaaagtcttgaaccatgcatataaaatattctaagtacagagatgattttaactaaatgatcacactcaacactaccatctcagggaacactgatatcgtggtttctcctcacaccaatgatgggctctttcaacatagtgttccccaggatgctataccccaaacccatgctccccaacaatacagtcctgggggctctgctgcattgttggtggtcgtgtctggcattaagtcagaggtgatttttgttgctttttaaaaacaacctgtctcctccttctctccctttccctcttcctctttccctttccccctccctcccctccttccctcctctctcttctcttctcttctcttctcttactcttatcttctcttctcttctcttctcttcttcttcttcttcttcttcttcttcttcttcttcttcttcttcttcttcttcctcctcctcctcctcnnnnnnnnnnnnnnnnnnnnnnnnnnnnnnnnnnctcctcctccttcttcttcttctctctctctctctctctctctctctctctctctctctctctctctctctctctcctctgtcaggatcatgaattcttctataaaacatacaccgtccagctcctctgcttcagaatcatgttccatcagatctcagattcttacatcctgaacacacattggctccaaacacatgtttgtgtctcatgctcacaagatggctgtcttcatctccaacattaaagctcttttcaggtagaagaagacataaattttctcctggtaatgcaacatacccctctccccaccccccaggactttttttaagacttatttttagagatgggaatggtggtgctctcctttgcagagacaggtaggtctctatgagttcaaggccagtctagtctacaaagcaagttctaggaaagccagggctacacagaaggtnnnnnnnnnnnnnnnnnnnnnnnnnnnnnnnnnnnnnnnnnnnnnnnnnnnnnnnnnnnnnnnnnnnnnnnnnnnnnnnnnnnnnnnnnnnnnnnnnnnnnnnnnnnnnnnnnnnnnnnnnnnnnnnnnnnnnnnnnnnnnnnnnnnnnnnnnnnnnnnnnnnnnnnnnnnnnnnnnnnnnnnnnnnnnnnnnnnnnnnnnnnnnnnnnnnnnnnnnnnnnnnnnnnnnnnnnnnnnnnnnnnnnnnnnnnnnnnnnnnnnnnnnnnnnnnnnnnnnnnnnnnnnnnnnnnnnnnnnnnnnnnnnnnnnnnnnnnnnnnnnnnnnnnnnnnnnnnnnnnnnnnnnnnnnnnnnnnnnnnnnnnnnnnnnnnnnnnnnnnnnnnnnnnnnnnnnnnnnnnnnnnnnnnnnnnnnnnnnnnnnnnnnnnnnnnnnnnnnnnnnnnnnnnnnnnnnnnnnnnnnnnnnnnnnnnnnnnnnnnnnnnnnnnnnnnnnnnnnnnnnnnnnnnnnnnnnnnnnnnnnnnnnnnnnnnnnnnnnnnnnnnnnnnnnnnnnnnnnnnnnnnnnnnnnnnnnnnnnnnnnnnnnnnnnnnnnnnnnnnnnnnnnnnnnnnnnnnnnnnnnnnnnnnnnnnnnnnnnnnnnnnnnnnnnnnnnnnnnnnnnnnnnnnnnnnnnnnnnnnnnnnnnnnnnnnnnnnnnnnnnnnnnnnnnnnnnnnnnnnnnnnnnnnnnnnnnnnnnnnnnnnnnnnnnnnnnnnnnnnnnnnnnnnnnnnnnnnnnnnnnnnnnnnnnnnnnnnnnnnnnnnnnnnnnnnnnnnnnnnnnnnnnnnnnnnnnnnnnnnnnnnnnnnnnnnnnnnnnnnnnnnnnnnnnnnnnnnnnnnnnnnnnnnnnnnnnnnnnnnnnnnnnnnnnnnnnnnnnnnnnnnnnnnnnnnnnnnnnnnnnnnnnnnnnnnnnnnnnnnnnnnnnnnnnnnnnnnnnnnnnnnnnnnnnnnnnnnnnnnnnnnnnnnnnnnnnnnnnnnnnnnnnnnnnnnnnnnnnnnnnnnnnnnnnnnnnnnnnnnnnnnnnnnnnnnnnnnnnnnnnnnnnnnnnnnnnnnnnnnnnnnnnnnnnnnnnnnnnnnnnnnnnnnnnnnnnnnnnnnnnnnnnnnnnnnnnnnnnnnnnnnnnnnnnnnntttctgctttcctaaaccccctcaaaatatctcttcaggactctcatgcaggatgtgtcacctggaaagactatctcctttccacctaggaccccacacccaagtctcacatccccaggtcctgagcagagagattcaatggcctctatatcccaggtcctgaaacctttcttgtccaaaacagactgatcattttaccacctcaggctcctccagatgtccagccactcacacgagccaaaccatagcaacatctttttaaacttttacattcgcacactcacacacatcgaggggacaaggcctcgtatgccctcaggctgcctccgtctcagactctctggagtggaagatgaccttgaacttctgcagccctcctgagtgctgggcttctggccatggattttcatggtactggcgtgaaacgcaggccctcgtgtgtggccggcaagcacagtgagagcggagctgccgctcagccacacagcagcatcccgactcctctgctcatgctcatgaaaagccccatctcctgcggctctcacgcccgctccctattctgcacctcagcagccttcgccgtctcccccattctgggctcctgtgcatttccacaccactgcacacggctcggctgttcaggagggtcctctgtgcacactttatttcctgtctggtgaccactgtcagtgcaaaggctaagctcaaacacaccgagtacttcatgccctgactcctgctttcctccgctgctagaccctactgactccttccttgtcgggaacattcctagtttgccaattcttatttctctaggaaactgctccttcgcaccgccctttctgactccatttcgttttgcaatggaaaagagaaggaagaagaggaggagggagggagaggaggaggaggaggaggaaggggatagaagggaagggtggaaaaaggagagggggttaggatgggacaggaggggaggctccattaaatctctgtgttaatgcctatgaggtggctcagtgagtaaaataacattctatacaagcctgatcccctaaattctatccgcacctcagaatctgtggtgcaaggagagatccagctcccgaaagttgtccttgatctcacaagtgcagagttaactgcacacacacacacacatgcacacacacataaacacacatgcacatatacacacacatgcacacacatacatgcacacacatgcacgcacacacacacaggcacacacatgcacacacacatgcacacacacacatgcacacacacgcgcacacacatgcatacatacatacacacatgtgcacacacacacatgcacacatacacacactcgtgcacacacacacatgcacacatacatacacacacacatgaacatacacacatacacgcacacacacggggtggggggagagggagagagagagtagtaaatggtagtaataattataagtttaacatttaaaacacctattattgtcaccttttctctagacaaatccaaaacgccgccaacagggtgcatgagtgtatatgtttcaagaggcaaagtttgaagtcattttcaaacttttaaaattgactgtgggattacatcactgaagcagaggataatggtttgagtgtgctgagatgctacctagagagcatggcatggagcctgcaagatgactcaagttaaaataatttcttgcaaacctgacctccagattccaatccctacaagccatggaaatgtggaaggagagaatcaactccacagagctgtctttcgacctctatacactctccatgcacacacacacactaaaacgggaacataatatgtcccttaggtgcttttggtgtggcccagcatctgcagctacttatcactggagagagcaaaggacagacagcagtttgtacctgtcacctggccctggtttcagtctcctgagccacgggcagaagacaggaaacagcaggtatggtctctctcattctcctggggtagagagttgagcccattcccaggtggtccactcagtcagagacatacagagtaaaatgtccaagacctcctcctcaatgcaaagcaagccaggccaaggccaagagtacctttgaagggagggagagagggacagagagggagagagagggagagagagacagagagggagagacagagtcagagacagaaagaagagatggacaggaaaccttaggagaagagcccgaaagagagggttgttttcaatgacagcccacaagcctgaagggacagagtcccaaaggggaagactcctgttgactgagtgattgactgcataagtggaaatgaccccagggagagaaaagagtgcttttgtagctagcctggagagaagcctgaaaactagcggctggattcctgtaccattagaggttaagtcagtactaggattaaatggcatgaggtgccaggcttaagaggtggctatgggggacctagggagggatgagcagcagggatgacctctctactccgaggccacagacactgcgatgtgcacatccgctgccaccagggggcgggcaagggctgaggagacggcgctgcgccggagcggggcggggcggggacgcagcgacgcccaggacgccagatcccgtgaccgtccgcccgcccgcagccgacatgcagtccccggcggtgctccgcacctccaggtgagccagacccccaacatgcatgatccagacgtcccagcagctgacggtttatcccgctgcaccgcacactatcctgctggcgtgctggcgcgccgtctagagtccccgttttacagacaaggaaactgaggccccctaaaggatccaagcactcacccacgtctccagaaaagcctgggattggcgagatagcgctggctgggacagggcccagcttcctgtccctgcgtatggggggaggggggcatttcttccggtcccccaaacatttctgcgctagctgtgtgaatagctcgatgctaagcaccagggacgaggtgaataaaacaaggtgtccctggaggtgatacccgcaccaaaatgactggtgctgcgggagggggcgtgttaagttcagttggcagggcagcacactgctgctgttgaaccccaactacgcagaactaagaccctggcagttattgctggagagagcgcaggagcttcctcaaaggggtcagagcagtgcgcatccacccagggccatactcacagctagggtgaggcttggaaaggcttgtgggcagggtggatgtcctactccttcctcgatttttaagtaactctgaaatgatgaactttaaggataatcgtatactctgcctttattccccgaatacaaactctagccaagatgggcaaacgggtgctttacccaacacaagttcatttgtattcccagctccctggttagaaaagtatggttccggacgtaagccctgatcttgaaagctgcttgctctccttggtgtggtgaggccgcaggccacatccccattaaaagagatgttcctatgaccctgtgagtcgttccctttcacagagcctcagtttcccttcctgtagagaaaggttccatctagagagataggaggacaggagcagtaaatgtccctgtgggccaccagactgtgactgtgagtttggtgctggtgcctagaaagggtagtggtggcttcccttggtgctagcatgcccccgagtgttagcaggcatagtgtgctgctgatggtgagggtggacgagtcgtgccctgtccaccattctgatagtcacagcagacccaaggagcttgcctttgaggagcacagccacctaagtaagcattgaagtggccctgcacccaagatcagctggagtttccagcctcctcctgcgcggcatctctgggcttcatgcagtatccatccagcaggtgttttctcgggatcccttcgatgctagacaccggtccaggttctaggatacagtagtgaggctttggagggaatgggtgggcagcgagaaaacgtaagctatgtcgagggtagtaaatgctgagaaggaagctgaatgatggggagggaggtcaggtgacagacatgagttttatacgatgtggtcaagggatatctttcggagagatggcaggcgaacaagctcttgagaagtctcacagtggaaaggactataggaaggagagcttgcagtgtgtgctcagcaggaaagacagaaaatccaaaggccgtgtgctgatgtggagggagcgtggagagagtgaggtggcctgcaatggagaaaggccatgaggtttcattctgagtgcggtgggaaacataggcagcctggccatgggagcaaggggacagagaacccgtggctgctgcacccatgtccttcaggcaccggccggagtggctgcacggaggggtgggaggaggggctgcagcctgtttaggttctctgtgtattctgaatgatgaactttggggtctgcaggatggtaaggttggctgtcagctgaagggctatactgtcctgagcgcactgcttcctgggatagggagcgggtagaaccggggaatcagcatttgttcagatgggtttgttttaaagcatgattgacggtcaaatggagattctaggtaagtaagaggcgggatggtttggagggaagagtctggaccacgggtaggaattgggccacccttggctctggatgctatggaaggccttgagtctgggtgaggtcattggagggcagtgtgagccagatcaggctgagccttgaggataaaggatgcataagagatctgtagccccatcacaactgaggcgcttggtgtaggacacaggtgggtatactgtgcctgtgagcatatcctaccaaccgcttgcttttgtgattccagttgtacaagaacacacccagaccgggcaggtgttggctgtagctgctttccttgtgtgtctaaaggccaagttgaacagttgtagctgaaataagatagcatgcaatgcttgagatattgtgctctcaggcttctggttgagtgacccaagtgtatctttcttgcgcgttccagagtgatgcttatactgtctggggaccacttcttgcgaactctatgtctggatgaggttgtgtgcctaaaagtcaggagtctaagggaaggacggggagcataattgtgccaatccaggagggataaggaaatagaattgtgtctaggcacaggagcaaaggagctgatgaacagggcgttttaaaggaagctgagccctaggcatgaagacaagggagccaagccggagatggagagattcctgtacagtacacttagatggtagagccgatacagggactgtaaggacagggatagggtatgagttcagttcctggtgtggttgtctgtgggaaacctccttgggaggttccaagtggggcttgacaaccctttgccatcttctaccactcagggtgaaccattcagcctgtgttacctgcccagcacctcagcttcattgccctgacaagcctaaagaaaaagggcctcattcccctgtcacagctagcaaggctgcctgggattgctccctgaaactctgacagcaaagataagctacttcctgttgaagccttcgttcctatcagttaggtaggaccacctgctgggcctgccagctgctttctccgtacctgagcctctctcccatgcccctcttgtccttgtgacagtctagcacttcagaccctggatactgaaaacttcagcctcagagaacactctcatttgcccattggttaagaagtggcctggcttggggctcagggattaagagcactggctgttcttccggaggacccgagttcaactcccagtacccacagggcagctcactgctgtctgtaactccagttcctgagttccaatgccctcttctggtctctgaggagactgcactcatgcagacaaagctcctatacacataaaattaaatgtacaagagaagtggcctggtgtaatgtctctcatctcacagcatgagtctgctgtggatgccttgtgatgcttctccagatgcagccagctcaagccggcagagggattcgtgcttggaatgcgagtattcctgtgtgtacaaggctgtacagtcactggacacacacacacacacacacacacacacacacattgcatatttcatgcttttagcatgctgtcccagtgtgacagccttgttctcaggcctgtgtgtgtgtctgtatgtatgttgtgttgcattaaaaacactcaatgggaaaaggggggtgggggggggggaactggagagatggctcaatggttaagaacactgactgctcttccagaagtcctgagttcaattcccagcaaccacatggtggctcacaatcatctgtaatgggatccgatgccctcttctggtatgcatgaagaggtcggcagtgtactcacacataaaataagtttttaaaaaaacaaaaaacaaaaacctccactccatgggctctggtaggtcctcactgctctctgggagcaaaaggattggccagcacatccttgcagcccagagagaattctctgactgtactcaggcacggatgtctgtcccctaagggtatccagaggaggaagccactgtttccctgcagcctcggatgtcattccaagctgccactgttaaaggcagatgggagcatctggcctattgaaccttgctgccttcagaactgaggaagtacgtctgtccaggttccctagagggcttcagtcctgctctgtcttctcagactcaggctcctctcttggtctacatacccctaacccctcagaatgtaaggacagactgacaaggacacatagctgaatgacccagcacctggagactgggccccactgaccacctcattggcgaaggctgctaatttgcacttgatcctgacctgccttcctttgctttacagacaagttcagaatgcacacacaggcctcgacctgtctgtcccacagcaccaggaggtgcggggtaagatgatgtccggccatgtggagtaccagatcctagtggtgacccggttggctgtgttcaagtcagccaagcaccggcccgaagatgtcgtccagttcttggtgagcaagggaccctagccatggtgctctgagggtgcccaggcaggtatgtctgtcccctcagaggaatgacacttctctataccacatgggccaaggtctggagtgctagactgtgtgggatgacaggaacgccagagtagacctgtgcctagagtccacagcaaggcagacttgcaaagaggcatagagggtgacagagacacctgggagcctgggaaggtgtagaagggacaacctaatgcaccttgaagagaagatgctggcaacatcttggaagaggcgaagggaggacaatggtttaaagagtatatgtatggtagcgctgggtggtggtggtgcacacctttaattacagcactcgggagtcagagggaagcggagctcttgagttcagggctagcctggtctacagagtaccaggaaagccagggctacacagagaaaccctgtctcaagagaatagatgatgttaagcaacaggagaggtgggaagactgtcccagaaacaggacacgggttgggatggcatgggaggagacaagggtagatgacttgcaggattcaggttgaacctggacgtgtcttgcggccatgtagttttaagtgacagtcctacctgcctttaaccagagcatctagtgacagcaaagcactgggggccataagacacttggttctgaggacaccatagtaagcctccatgctgggagccagcagaaacagcaggctaagaggcaaggagagaaggaggtgcttacagtgtgcagaaggccgagatcagccacacccgccaggagcacgttagaggctgtggtgagcgtgcagtgttcacccactgggcgggcacgggaagcccagcataggagtggtacttaggtatcagctttgaggccctgttaagagctgggagtgggtgaagctacccagagagcagaggtggagacgggagaaatgctgagatgatgtcctgaaacaccagccaggccaatgacgacagctggggcggccatcaaggcagaagggaaggctggcaggctgaaggcaaggaagctaagggaacagagaacttcaactaaaagtctaatgggttcatacatttttctaccctttggcctcttatggaagggatccagacctggtgagaatgaaaaacgggcctcaggatcttaggctacggtaaaatgaaccaaagtccttgagtaccacaggggagtggctgcaacggtttggtttggcacctccaggcggctcagagaaaagaaagtaaagaatataacaagccactcccccagtgctgtttttcatctgattgctccttagaccaactcttgattgaacccaggtggaccgtgagccacggttctgggtctgctgcgttctagtgtggatcttctgtgaggggccagttgcagctcctggtggtctgacgtgagctcaggtatacccagtgattctgggctctgagggagagaggcagcaccctaggagcccttggggtccagcgcagcctgttctgacccgcacagaaggctgggtgaatgaaaggtcacctgtcacactgccacacgccacattagtgctgcatgatcctaaacagtgatgcccacgccctgtggaaagcatgttggggcgtgtacagagtatgggtgtgcacatacattgcaggggcctcacagacctgagagggcaaggggaaactcatttgctttcacacacacacacacacacacacacacacacacacacacacacacacagtggtatctaagggtgtaggccagagttatgcttccaggtctgcagtccccctagaatgggatgagttagctaaaagaattagtgagcattttgtgtctatgccttagaaggatatatactttttaatagaagcaagcatttaagttgctagccatgaaatgaagccagcccccaggcaggagcactgtgcctgaggtctggcagacaccctgcgtatctcattacacagatgtgtgtgtgcgcgtgtgtgtgtgtgtgtgtgcgcgcgcgcgtgtgtgtgtgtacgtacatacgtacctattagaggcagcgtcgtgctggcccagtgctccgcacttcctgccacgcagagccattgggtccttctgtgtccccacttagctccctgttgtccttgccgtgtttgctgttggctgcctgatgttctgcctagcacacaagtggatgagagccctgggtggtgccaggagccagggcttaaagctcccactctggccctcacagggcccggcttgtgggtctttggcctgagcctgcatggagcagttaggccagcagggggtgctcatccctcactgtggccaggctgccgctgcctgatcctcagaacaactcaggaactccagcctgagcaaccagctggtgcaccaggaatcctccttaccctttccctgggagttcttcccaggaaagttccagaaccaggctcttgtgttcaactatggacagcagctacctttcccaggggacccccccccacttggaggtttctggggttccacccccactgccactatccaaacatctcctggggtctaagaccttaacactgggtggtgtgttgattattgagatgtggctttctgagcccccaaatgatggggacatccagagtctggccacacactagcatacactcaaggtggtgcagccaggcctggaggagtgggcggggcatccatgccttcatccttaacgttgccacatatttcctggggagatgggcctggcctccagggaaccaccaaggagttcaggactgagataaatggagggtgttggtgaaggctgtggcataaggcaagtgacttttgtctgagctcatacagattgtacagatcccagcaatggcactaccaaacccgcggggattgtacagatccaggcaatggcactaccaaacccgcggggctatggctgctcaccgcacagggtccagagccagctggggatttctgtgtcaacaaatgcatgctcacggagctgtggggaggtagaggaggcagattcgatccatcggagcagctatcctggtatttacagtaaaccaagtaccaccttcagagatgcaagggacccctgggaccacttggcggcggcagcaggagctgtggcctgcttcacccagacccctatgcaccgttgactcctgctaaccttactcatctctgtcaggaaaggccccacctgtcctgtgctggggtaaggtcacacagtgctgtcacaagatggcctgacaccggccaggtgccaagctcactctactcaggttcagaaagcccagaataggcagaggccaggttcaggtccctgtgtcctttacctgagcctgcaggggtaccttaaatcactccattgttgtgtccttcctttgggactctgagatgtccctggggaagagattggggctgggaggggtataaagggccagcaggcaggcctgctccaggcacatatctggtcagggtgaggaaacttctcagccttagttcttctctcaggaaaccccatgctcctctcattccaggtctctaaaaaatacagcgagatcgaggagttttaccagaagctgtacagttgttacccagcagccagcctgcccccgctgcctaggaaggtcctgtttgtcggggagtctgacatccgggagaggcgagccatgtttgatgagatcctacgctgtgtctccaaggatgcccagttggcaggcagcccagagctgctagaattcttaggtacccaaggttttgtcccatgtccctgaggtctctgcatcccagaacccatctcaccactgtgactcagtgggaggcccgttgccaccctccatggccttcgagctttagcaaggatatttagggagttgggcctcgataaccccctgggctgaatggtgagggggagacccagcccacagagtgacctcaccatggccttcctggccatcgtcgatgtatatctcccttcacgcagacacttgctgtgtgtccatatgtccctctgcctcctgccacccagacctgtcagcctgggaacactgtgcctctgctggctccatccctcgtgggctttacgctcagcccacgccccacacagagacaatgggtgtgtctgacttcccagcactaaggacctcacgctcttcggtacagcaccagggagctcccacccccgctctctcttacaccagtgttctctctaagagaagtcgttttctgatggagactgtggggatcacatgaactaacacatgaagtgcttcagacagacgtatcatcgggggaagtgatcaaaagacccccccttctgtctaccgaagttcccctagagaagagaagcgtctgcccttctggccctgaatggcagggccaggccacagctatggatggagcctagctccctcctcaccttctccgtcttctggccagtcatttaactttgctcttttctactcctatggatctccagttctatgggacagagcataattcccataaaccaaatgccaaggttttaactactgagtgacattcattcactcactcattcattcattcattttttaagacacggtttcttatatagccctggctattttggaactcactacacagaccatgctggcctcgaactcacagagatctgcctgtctctacctcccatgcagggattaaaggtgtgtgccaccacacctagctgagtgatttttattttttaaaggataactagctagtccttcccagcctttcacagacagatgcactcacaatattgtgtgctcagaggctgtggtgatgccaagcccctacggacatctctgggccttgcttcccctttctgaacttaacttatcttgaatacctgtctctcaaccatgctttgagaagcactgatggaagcccagttgtcctgggatcttccacatgctcactgcactcatccgggtggtaatctgatactgcaagctcttggagttgtctgtctatggttaggtcagcagagttcatggctggacttactactgtaaaaacattctgaaagaaacagccctggtccagcctgattggaccttggctgttgcacttcaccactgcgttagtgggcagttatctgtggcacagataactctgggtattgtggcacactctcctctggcatgacatagccctcttgaattcttagcatctgtgaccacttacctgtttgtgagctatacaagattgggtccagtaaccttccctcgtgtgggtaggaggggctcacaaggccctacacctccccaggggacacacagggcagatggaagaacagacaaatagagtggtatgatggatagataggtagctagtcaggtgggtggatggatggatggatggatggatggatggatggatggatgaatggatggaaaggcagataattaagatagacggacagacagacacacagttaacagttgttaggagagaggcttttctcacatagtgtaactgttataagcaccccatgcccctgtaagtagccccagttaattcagctcgttaagctacacatgggtggaatcctactgctgttatgcagatagcaccctatcaacatagaatgtctccctggaaaaagtttataaaacacttctgggaactcctgccttaggcttcgtctgacgttccccatggccaggcagcagcggggtcccttgagcgtcatgtcacatagtgggatagcacagcacttggcgctctccagactctccacttaggtgtcaggaggttaatgcaatccctcagcctcagaacctggcttaggcttaggcaggtgggtgtggtgatgtcgccttgagagtagacagcaagctcttgttttccttttcttccacaggcaccagagccccaggggctacgggccttgccacccgagatccctctgtcttggatgacacagccagccagccaggggacagtgatgaggcttttgacttctttgagcagcaggatgaagtgcagccacccacactgggcctgagcagcaaggatgtggagaagtccttggtgggagaagaggaggaggaggaggaggaggaggaggtgctggatcccctgggtatcatgcggtaggtctccacttcttccgatgtcatttgttcaaggtctgggccatggggctttaacctggtgtgctcaagagagttggctcagctccgccgcctcagtatcacccgcctttgtggctgggctcagaatcccccgccctccccagtgatatcccccatctatggctaactccacagagttaaccccacgatagctcggtagcacagactgctgggcccagtctgctgccattgggacccggcttctccttgcagagtggcaagtgacttgtttgcccccagagcatgcttcaccatctgtaaggcaggacttccttcagctcctgcgggacaattggagacctccatgaacatgggtataagcacccttggctttactcctctaggaggcatcccgccaattagacggacgctcctgagcgcgggtgggcggcatggatctccctgtgctggccatggggacagggcacaggctggaggaggagatgcagaggcaggcatctcctgccatagcccctccagtggaagcaatgagctgagaacgcaatggcttccctaatggaaatcggctactcagtcatcccagaatacttttgttccttcttggctcaagcaacgagcaactgatattttctgtgctaggcatggtattgtacttcccatgctgagcctcatctgttccttgcctgtaagcatcagttggaggcggggaacggtactagattggcactgagtttgagggctttctgctgggacctgagttctagttccatcctttggtcgccaaggctcctggctatctgcatcttcagttttcttcagtaaatgagcgggctcttggaagtacctgcttcctggagcagtccagggaggatcatctgatgtgcatagatgttagcattagctgtcgtcatagactctactttcagcagaacctgaccaccacgggccagggcactgtcctcagcaccgtgacaaatgggtcttaggaatttactgctgtccccagtatacagacaggaaaggcctgcctgaaactagagccgccgaagaatcggacagaggcgtgttcagtgtaatgacataccaaatgaagtcccccaaatcggtgcccgctcagcacgggtcttcccccagtgtgatatgtgagccatgggctgcagaatcttgaggtcaccacagaggcctcacactggccaaagctgcccaggcaggcacagcggctgccgcaggcccacaggaatccgtggcctcccggtactctccagccagtgagggtctggtccccaagggtcaggcagtaagggtcccagggtgacatggggagacacctataatgcccaccccttatcggcctcgcccagccctggggccctgccataaggccttgtttgcactcatgccatctgtggttctaagtaaccatgagtagtgacaaactgaaatggacttctgaggctgcaccagcctttggctgaacaacagagttagccaagtggctccttttttgggtaggaaactgctcctggctgccaagtgctgccttgaatttctttctctagtggcagagttgcgggtggggacggggcggaggtcttaggtgcctgacagccagcctgggaccacctgcagcaagctctgtgctcttggggggcccctggctcctggattccgggaacacagcaccaagcggactccccttcctgccagattttttttttaaggacccatgtgacacccagttggtattatcggctctgtcaggcataataagtaatgtttttcgagagctttttcagtgccaggaactgagctaactggtgtttgcttgggagctcatgctacctctgagacttgcacttctgaaatgggctgtgacccgcagtaagtgcggtatgcgtcaggacatgtgtatgtgcttcgtgtgggaccaggcgaggtacgagagcacagggaagctcgctgagtgcactccgtgctcatggctcctctcgggcctcatttgtgaaaagattcataatgtgccaaatggctttctgggcccattgccggagccgcttgggaaagggagccctggaggctgacactgggcattgcttttgttttctgtggtaggacactggagcctctgagagtcagatggcttgagctcgttcatataaccccaagtggcagcaccagggcttgaggccactgcaggcatctttcagcaatgtggcaagaggtagggtggggcccttacacatagggccatcaaaagattcgcccaagcggggactcggccaaagcctggtggtgtggtttgctttctaccactgtgataaaggccacgggtgaaagcaactcagggaagaaaggctgtctttacttggcttacgcttcaggttcatccctgagggatgagagacaagaactaaagcacagagcagggaagaacgctactcactgaattgcacctcctggcttgctcggtttgctttcttacacaacccaggcccacctacccaaaggtggcaccgcccctgtggcaccgccactgtgggctgcgatctccctcctcagtcattaatcaagaaaatgccccacagacttcatgaaggcaatctgaaggaggctttttctcagctgaggttcccttctcaggatactctagcttgggtcaagtcaacatacatacatacatacatacatacatacatacatacatacatacatacatgaataaacaaacaaacaaacaaacaaatccatctggtatgtgacagagcaggtcaggtttcccactcagacacaagggctgcccacctcaccctttggggcattcttcttatcctcgagagctttgtagtctgtatttcctcagcaactctatacacacatctcatattccctgctgtggccacaagggggcgctcgggctccatttcaggagtgtctgcaagggtgggagcagttggcacaaagcggagtctgccgggcctggctttcctttgtctcttcaacctgcctctgactagggaaaagtccgctgtgttataccgttatggggcacagaaaagcccccactctagcccattgaaacagcattgcttcttattttctgggtttttgggtttttttgggtttttttgctgaccctgtcccagagccatctggactctagacatagcgttcacttcaccattccaattaatgttctgtctcaggcgcctttctctgtcatacatacttaccgtatttaactcgattttagtgtctgtgtggctctgagaaaatcgtgccttgcactagaaacattttcaacacaactcaaaactacccaggtcctagggactgattggcgagagtcccttccctcccaggagcagggatatttcctgcagccttcgcttctctacttctccctgaacaaagggattgtttcgtgtctgtgcctccacagtttggaatggtctctctccagactctgagccagtccctcagcccagtcactgcaaactgcactgtgagccccggcttgtggtacctttcatgggcttttgttgtggtgggctataatgtgaggaacttcacgggtccggagtcatcattccatagaacttttcatctaaataatagcctcagaacaaggcccctgaaggttctgcaggggacagtatgataaaagctctttggggctacacatttaccctgttgaaggtccctcttctcttccacccctcctgctacttctccagcctgcttgctggtgacagagaacacagctggctcttttccctgcctgtgagactggtttctcaggctctcaaagagaggggagagcctggcacccaagtggagaaggcctttccttggatactgttttatcattagttttatataaatttagtttcattttttccatgaagcagccacttctgttgaacctaaaaatgctttttgtatttagatgaaannnnnnnnnnnnnnnnnnnnnnnnnnnnnnnnnnnnnnnnnnnnnnnnnnnnnnnnnnnnnnnnnnnnnnnnnnnnnnnnnnnnnnnnnnnnnnnnnnnnnnnnnnnnnnnnnnnnnnnnnnnnnnnnnnnnnnnnnnnnnnnnnnnnnnnnnnnnnnnnnnnnnnnnnnnnnnnnnnnnnnnnnnnnnnnnnnnnnnnnnnnnnnnnnnnnnnnnnnnnnnnnnnnnnnnnnnnnnnnnnnnnnnnnnnnnnnnnnnnnnnnnnnnnnnntgctctgggatgaccctccagtttttgcccgtagacacccacccacccaccacccgctagtcctcctggatttgcaaacccagcatctagaatctctggggccttgccccctcctgcctccaagcaactgtggaatgccttccttgggtgcctcttgctaagtaaataacaatattctcaactcctgtcctggattctgagccaggagaggaagcctttgctggatactccgttgcagcagagagcagttaggggctgtgtttcagcctggaaccaggtggggatacagattcccaggccccctcggccctgcgtggaaccatggcctctcagtgagtctgtgtgtgcgagtcatgctgatactccaggcactaaagtatgcagaagtctgagagatgccctacacagtgcacaggtgaacagggatccccagtcctcctagtctccccacccctgctccccttgacactctctctctctctctctctctctctctctgctgtctgtctttactgcagtggttctctgaggaccggataccatagtggagctccctaggagagtcaccatggtcccacgtcatggctagccccaaagtaggaagggagactgagtcaaaacattcagccacacttaccaaggggtacagttatctctgctgtgtttcccatccaggtacctttgctcctggcccagcctcagtgaagggactctggggactatggttagcacggtggtttctgtcctttttatttgattagcaaaggcttcaagaggttcacgaggaaagcctcacacagacccctaatgcaacgaccatacccaagtagaattgtcttcatttgaacaggcatggaaactagatctttgtcctctaaagtggccctagataactttagaagagtctggggcctcttgtagcatcgctcgaaagccatcggggaggctggaactccaggatgtatggtcacccccaaagggattcaagggttcagcattcccatcccagctctgaagtgggccgagggcagtttgctgactccaagctgtggcgtcttcaggtatggaacagttagggtttccgaagcaaagggacctccagtggggtggaggagtgggggctgtctagcgtttcagaacttttacacttcccaccaaagcccccaagggtctaggcccaagagtccaaaaggaagaatgcagagttcttggtaaaatgttgtaactagtttgtactcatcctgaggccttcatgcgtctttcacttcagatgaactatagagggcgttagctcctattgttgagcaaatcccagcgccagatcctagcttctgggagtccctggatggcacctcctgccaaggacagcggggaggctggcttccctcccacagcgctgcccctagaggaggcggtttgctaggctgaggccttaatggatacttacctgactcctcagtcatgggaggtcatgtctaccaccctcctgcttgaggctgtccccaacatcaagtgtggcactccgtgttcagtaggtcagacttggcattctgggtaacagttggggaacattagtaagacagcaggcgcatgcagagagtaggtacttcagtgaccaggtgggtggctcagactcttcatgcccagctgagaccactacctacgtcaagtctggacttcttcagtgttttgtttcttggcttgcttctcaagatagggtttcactgtgtaaacttgactgtcctagaactcactctgtagaccaggctagcctcgaactcagagatcttcctgtctctgcttcccgagcgctgggactaatgatagcatgtacagccaccacccccgactttctgtttttatccgcttgctctctgtttggatgccgtgggtgatgatgggcagctcttccacagtggcagcaattagaatactgtgggatcttgatggggaccatagaaaagacaatgcaaataagagtgtacaaagactgctcgctcggtctgcggtggccagggtgaaaccggccaccagcaaccttcattgccagagactccagagcagacaggcagggagtgagaagcctcagagtggacaaaagggaaggcaaggttgcactgtcactgggggatgtcagcgtgggcaccaagaagcaggacttctgggtcctagggaattgttaaggaggtgttggcctgctttctctgactgatcccactaaattggaagtgaagatgacagttaagcatcccagcaggtattcatcacgcttggcctttggggactaacagctgcataggtagtttgctgcaggctctggtcagagtgtccatataacctggcccttgtccccttgtgcatgttgtatctctcggaataattgcagcctgagcaaggctggatattcacctcaggccaaagggttgcccctttgcaagtgagaccacttgctctcctggtggtatgtcgtaggtagaagacagagaaaatgaaatggtgtgaccccaaatctaagaagagggagtcactactgaggtcctggtcgctgtagtaggccttggctctggaaagcttggacaggcttaggctgtggccgttgggattcacagcactgaggcctgtccagggtggttcctcacaccgggcctgttttcctgttaggcccattatcataagccggacatcatgagacgacctcaagcctctggtcttgcccactgccctctgtgtacaggctgcagagagctttcgtagctcctccccctgagtcccacttaccaaattaagagaaaggactccgaggcaatgtggtgacccaggtgtgccaagctgtgttcttgcccgtgcttccacagggcatggctactatactccagctcttctacccagtctctccctgaagttccagactattccatgaggcagcctgaccctgtcctgacagttgctgccctaggtaaagctgtgcagggataaggttcagaaaggatggaggagattgcctaaacaaacccagagtccacatataaaaagccaggagtgctggcatacacttacacactgggactggagcactggagacaagtgacccctggactgcactggccaggtgtcttagagaccctgattcaaaaacccaaggtggcacagtcccaggggaatgacagctgaggttgtctttgggcttgcacacacacatgcgcaggcatgctcacacaaaaaaagattgctttgtggcaccctaagaattttctacaattgaaataaacaggttaagatgtgggaaacgcttcatttttaaaagcaagaaagttgtcttgtcggggaagaggtctgttgccatatttggtgcagcatggccctggcattgaaggtggtctgtgtgtgctgtggacgcccagccttctgtccaggcccaggcgggctgcccgtgtctgtagaccctctctgttactcccttgctctcaggtccagggcagctggtgcccgtcactggttgctacaggaggtggatgagtctggaatgactccacgaggcccctgggtggccagagggaggctgctctcaggtgtcaatcactgtcaccagaagtgcctgagccacagggagtgagacacttcttggccaggcagagctttggaactgtcagcagcagctgccacatctccccgagtttgctacgcccggctctgaacgtggcccggctgtgcatctggctcctgtcagacacacagtaggagaactggagtctgtacaccagcatgaacatgcttacacatgcctgcggccacacagggaccactacctatctcacacagcctgtgctgggcaagatgcctctttaggtagccctcaggatctgcacaggtttgccaggaagtcaggggctgcagaccctgctctgtccctggtgtcaggacatggctttctctcctgtcagcgcggagggtgagctgcatgtctgtggccagctgggtggaggcgttggccttggggagtgtaggagaagcatgcacagagccccggtgactcaaatccacatgaagtgattgacccaatccatccaacgcgtaggttaccattcttgtaatggtgctgtaatgtcccctcccaccagcattaaccctgagcttccctgtctccctgctgctttgttccacaagtcagactgtctgtgagcaaagctccatgagggatggcttccccctccctcatcacctagcggggtttatgttccttgtcatgccacagtcgggctccttcaatgtgcggggtgactggcagctggtctgccagagacgttcctctcccctcagcccactagctaagctgccgttacctcctccaggagtccctccctgtgccttccttgagtcctctgtgctccagctgtgacagcctggctggctggcatctcaggtgggtctgtctgcatcacctagagcaggcacctctacaggggcactgcttggggagtgctggttggaggaaggggaggaggaggaatggacaggctgcttgctgctgaaaggctggcaggggttattgttagaggagcagcgatggaatagagaaagggctttgtaaacatgagcgctgacaactgctgctctgacccctcattccctgtcttattacttgtgtctgtctgtctgtctgggatgcctgcctgcctgcctgcctgcctgcnnnnnnnnnnnnnnnnnnnnctccctccctccctcccttcctcccttcctttccttctttccttccttccttccagtcagctaatctgtcttccttctatctgatgactatccagctacacaggacagatgcctatctgtcggtctgtctgcctgcctgccttcttccttttagtatttgctgaacacctttctgcagttttaggatcaatcagacaagaccctgggggcttccaggtcccctgatgccccttgtgttctcgtgggtgatctgagggatttgaggacaggaccgccaggtagctggggcagggtagtcagtgctgactgaacactgttgtgctgagcatctgcttcagttcagtgcagcagaaatcacagatgtcaccaaggaggacaaagatgcgtgtcaagcttgtgagggaagctcgcccagaacggtctagccttatctgtgtccgttcaggaggacagacggatggtctagccttatctgtgtctgtcctggacggactgagcagaactggggaagtggttggaacctccctcacctggcttcccgcctgttctctcacgcactgtgcttcctgctgttcttgatccgtaggcggctttgctcccctgccctctgggccttttaagtgggtagcatgcgcattgggtccccaaagaaagtggtttctgagtggagggcaaagctaccagaatggctgaggatcagcctcaagccctgaagtgactggccaggcactgccgatacaggtgtaaatggggttctctgccagtcactgctgctgtgcccactggatccagggccaggggccaagcaaaggacattatgataggtgatcaagagacggacatattggtgatgaaacagagcctacagttctcatagggctggtctaagggccccccaaccccagtcgatggtcacattccacagagccgtgctcacagcttccatccagggccttctaggcatattgacacagggagtccagactctggtcacccttgctagggccatggcctctgttagtcaccaggactgttgattctgcctgatagataaaactacaggggcgccctcccacaaggagcagctgagtccaccctgcaggatctgagaggagctagagccgaggctttctgaagggtgcgagctagcgagctagcgatccttcacccacccccagcaccacaggcaggccagagctctgttggcacttcaccatggtggcccctgttgacgtgcacatactgcagtagggacacagatgccatcactgttgaactgtgccactttcaccccagtggacaacacagacaattctgttcatgggatattgagagtaacaagcaaagtcataagtattgtcctagtatgatcataattagttactaccctactcccaggcccaaaatgtccagcctgctaggcgatctccaccagacacgctatgcctctgaactggggtgggaggggggtggttctgcaggaatagtcacctcagagtccctggccttgcagcacccagggacctggtatttttatctgagactggatagtctgtgttacagcttttggcaatggccagcctctgtgcagtttgccactgtgttgccaacatgagctcagaggtgacctcagcccagtggaaccggctgccaggcgcttgggagaatgcaatcctgggttccagtaaaaaggaaaaacaaaacaaaacaaaaaacttttgccgtttataggaatcttaaaatgcctaacgtgggtggcagccccagagcttgaggtcagcttgttaaaataaaaccaagtttgtgatctggagacagtgtcacaaaggcagcccagatcatgtgatccagcaaacatgaagcttgcctatccacctggatcaagaaataaaactgtggcacaccccaagaaacctctctggtgacccccagtttcccaccacaagcatctcagggcaggagctcttcagtcagggaacaggtgtggcagagccaagcccacctgactccagaggaacttcagaagggctaccctacccagggggaaccacattgttgcttagaagggcagcaggtatactacttagagaagactgatgttcaatgtccggcaaagcagggcttaggctttgtgatggttaatattgcccgtctaacaggatcaaggattaactagaaagctagcctctgagcgtatctgtgaagggtttttggattggactaattgaggttggaaacccctccctaaatatgggcagcaccagggtatggtctggtgtcctggacttaataaaggggtaaagcaaaccaagcaccaacattaacccccaccctgggggggccgccatggtagacaaaccgtgaacctatgcaatccctgccttcttgaagttgttttgttattgttgttgttgttgttcattgttttgtaccagacaaaagagaagtcactaacataggcatcctcctgctctcctggaccctatcccttgaactttgagccccagattacatcaaccccatgtctaagtggctgtggggtgcaggcttctgaccccaaggtctctgttaggtagctccactgtcttagttagggtttctttccattgctatgaagagacaccatgactaaggcagctctcataatggacaacatttaattgggactggcttacaggttcagaggctcagtccattatcatcatagtgggaagcatggcagcatccaggcaggcatggtggtggaagagttgagagttctacatcttgttccaaaggcaaacaggaaaaaactgctgtcttctgggcagctaggaggagggcctcaaagccacccctacagtgacacacttcctccaacaaagccacaccaacaaggctccctgggtcaagcgtattgaaaccaccagtcaccttcagaagaaaagcatgttgtcgggcccatggacatgtggtggcatgatactcaagaaggttagcagctgtctggccatcagtctgtagtcctgatagctccttgcttctcctgcctttcccagtccccatcacacctgagcacagtagtgggggctcatcacttcagtagcgggtgtgggggtctctttgctctatgtcagatgataacaaagctcattcctagcacatggccaaccctgcctcctcccttctccctgctcttgcctgcttgacccccttgggtcaggaggacctgtcagctgaagatttgacgactactaaggttgcttcacatgccaagatggctctggttgggctacccctgaccttcctatggtcctccgttgaacttcttctatgttccttggcatccagaaggcccagctgagctggggacctggaaatgaccagtaggcccccagtatactcatgagaatccttaccttgtgttttatctccagctccaagaagcccaagaaacgcccagaagtggccgtgaggcccaagcctgcacctcggctcaccatctttgatgaggaggtagaccctgacgcggggctcttcagctcagacaagaaggtgtctgagacccggagacccctggagaccacacaggactgtaagtactagtgttgttcctggtactggcttagagcttggtgaatgtctatgtccctgagaaagtgggtctcatccttgtcctgtttagatagaatacagattaggaatatagagacttcctcctggtgtctctcacacctggtgttcccacgggctgcaacatttggggattacacactcactctgaatgtcctatagagaagagaaggtccggcttcttagttgcctggagacctggttccttaattacatctgcagccacaggggcacagggatccctgcaactgtttaatggaacatggatactgacctagctttgggcgtgcatgtgactctgtacagcttttaattttaatgagtgtatgccacccacatagattctactgcaaggcgtggtacaaggttcagagggaatgcttagaggctttgggacttttccacatgtctctgacctttcctcatgcctgcccagggaaagaattgatggtaatttattgattcacccagtgcttactgagcatccactgagggaagatccagctcaaatccccagccttaggatttcagagcccatggaggataaagatagataatatcacccaaaaattcagcacagcccaagtctctttcaggactgagcagagagataccggttcccataggacagcaggcattctgggagagagtgcagtggtggatcccaaaaggccgggaggcttaaccgggtccactgggaaaagacgcttcaagtaaacacatggttgacactcccaaagagaggctcatgtgggagagattgggaaggcccgggcttcctgaagatgggtcctgtgggtaatttgtgtctgttgcttctgctcatctttcacaaccttgacaagatctgtggctggtggctgcccctcagtacctgctcattagtacctgtgggcaagctcagggaccctgtccagccagagctctggggatcctggtgctatgtcctgagaagccacttccgccagcagtgagaagccctgaaggactggaacagagccaggccaaggcggacaggccgctcagacccgtgtattgctgctatgttcttgccttccttctgccctcctgtctccctacactctgccttccttgctcgctaaccgggatgcaataggaggcttagcaggcctgctctctcgcatctgaggatagataagcacttcctttctcacctgctacgtcttctctccccacagccctgaagctgtttgatgaccctgaccttggcggggctgtctccctgggtgaccctctactgctgcctgctgccagtgagagcagagggcccacatcccgcccagaacacggggatgcctccaaggagctgttcaggtactcctgttccctgggaagacttcattagcttgtaagccaagtacaagagtgtcataccagcttcagcccacaagggaggagggatccaggcctggccaagtctcgcagccatgagtagctaaaagaatgtgaggatttgtaaggagaaggctgtgggcaaccagggcagccccactgtttccatgaactacactcattttcttctcacactttctgttttaatagcttctttaaaggaataaattacataatttatgagcaagtatatttggcataggtgagttcaggaacaaataaaattgaccctagatatactacagcatagtcagagagaaaaaaagcacagaggtacttagcaacaatggcccagtctgccaggaggggcctgtcagagggagagtaaagccatggttaatctgttaagtgaaggttgatgtcagaagtggttaaaaaaaaaaaaaaaagactgtttccttagagtttactgtgtgcttgtcattgtaagaagtttgcttcactgcaggtaagtttatctatctaacccctacaatgggtgctgttctctgcaattacagaaaatagtttagaaaagaacacttgcccgaggctaccactcctgcctgcctctctcaacactgctctatcccagcagcagccctgagcccttggagaagaggctgagagacctgttttgctgtctctggctgcctttctccctgacttctccttgtgccagaacccagtttccgtttgcttccagtatggtgtctctctctccctggccatgccacacatgtttggtgcaggaagctgagctgcctctttccaggaatagtttaaatggcaccgaggcctgtggtccttagaggctgtcatgagcacccctcattagcagccccaagctattacacagccctctaagtacccgccaagcctgactcacctcgatggcagtcttgtgtttacatctcccagaggcccctggcatctgttcactctctcctcctgtgtccttgctcctgacatcctgctggctgggaggagccagaccatggttattccactaggggagaaactgaggcacagggaagtctgaaagcagggtatgtatgcccatgggacggacatcacagggcctctcctgcatggcatattataaacccttccctttcaatcccaccttccacagagcattgttctgtgggtgtgtcgaggcaattttcacagaactccatggccagctgacaccagcttttagcaggcttgtcatgcacacgccaacgctgccatgccgcaattcatgaccctattggtccctgggaaccttccttttcattgcacctccctatcttgcacagcccctgggagtcacagctcagagaatgtgcacttcgcatccctgtctccattaacagacatctggcggtgaagaactggcttcttgagagagggagccaggatttatttttctttatgcctaccttgttcctgtttaggcagtgagtggcctgcttcttggtagcaggctttcgctgttagccaccggcctgaggtggcagtgtctgagttgatgagtaagccaagcggacgttaagaagcctctgtctcaggccttaggtggatctgtagctgagttctgtcctctgtgggggctgaggaaggaggagaatgtcatggcttcaggacacagaactcttcaggatgaccacctcaaggaacaacggctgcctggagaaagctcatacacaccagggctgagaccggcgggaacagtcttcccatggatgacacccccagcatctccctacaggggccagtctttctagaagctagcccacccattccctccatgtctagactttttgctggtttctttaccacccaagcaggctctgaaagccccagtcagcccagaaatcaggcaggacaatccagagctcccaagcagctgggtcctggcgggcagtgctctgggaagctctgtgctcagtcaggcctctttcaggctttgtagggccagagcattgttcagaccaaagcacctctgtccacgcctggcccctcccccaccgcagtcctgctggggtagtgatgtaagggcacactgtccagggcagagagcctccatcacaggcctgaatccttttggcttttcattcccaccgccctttgctctccgtcatttccctctccaggatcctgccattctgtggcagggccatctttcttctccctttccttaagaacccgttccaatcttttctggccacacccttccccggccatcaagtgagtgcttcttagcccctgtcactctcagatcctctctgtccagctgggttggggttccccgcgggaggagcgatgcatcagctctgtgacagccgatgcctgctctccctaacattcctcagctgtcggtccaagtcagcatgtgcaagatcccctcgaacttgagaagcacctcttgtgtgttgctttctttggtccttacagggatccctgtgaggttagaggagcaagagcaccccttctttacacatgggcagagactgagagagccagagaggcggcgtggcctgaggccacccactcgggagctgacagtagaagccaatcctgcacacagctgctggactcccctccccctccccttcctggagatgggggagctgagtggtccccgggttgtctgctttctatggctgtgttgtgtctacctggcatggctgaaggatggctgtggagataaccgtcaccacaagggacggtcccatcctgaaactggagaaggggcctccatgtagtggtacccaggaaggtgatgcgagccagccagtgatataggtcaggtgcttcatcctcatcctagctatggagcccaagacagggcccttcatcttgccacagctcagtttgcacctctgtaaagtaaggttcatgtctgctcccagacagtgtttaaagcatcaaataaaactaaagaaggcagaagcacctgccctgtaggagtcgccacagtgttgagtaggctgatgggcagaatgcgttaatggagacttgttttgtccatctggttctgagatagctcctccgctggggactcccaatatgagctctcccaggctaaagacaggtgaactgtgggccattggtcaggctcttcagtatccagacacgttcccctccttgccaatcactactaaagcctcatcccgtcagcctgtgggcagtctaggacttgctatctcctggacatttttaattttgttgttgttgttgttacttcgggtgtctggacgtatatgcacatgtacctgtgcattgtgtgcacagtgctctcagaggccagaagaggggttgcattcccttggactggagttgttgcaggtggctgtgaacctgcgtcccctggaacagccggtgctataactgctgagtcattgctccaagctcgcatgacccaatcttggtgagaactggctgagtccggcagctcagaatccagctctccaggctgccctggcctgtgtctcctaggagttgatttagcttcatgttgcccagctctccaggctgctctggcctgtgtctcctaggagttgatttagcttcatgttgtgtctcctaggtcaagactatgatctagtgcctctcattgagccacccaggctcttggactgtagcttcctgtctgccaaataagaaacatatatgtccttccctgaaataggaatttgagagacacagagaagataatgattctggggtgctctggcaaaggctgggagtctgtaccaggcggcaggcagctgtttctaatgggctgggaggcaagtcccctgaagacaccagcaggtttgaagtggtgtcaccaccaagggactggctctcctctggctgctgtggagatggagggtcagagagccctgcccttgggtttctcctcagtgctggtaggataaggcaagctcagtgcccatgtggggaatggcgaggctccgccccttgctcctttgtggatatagttatgctaaggctgttctccttgcttctctagagttgaagaggacctggacctgattctgaacctgggatctgaaccaaagcccaagccccagactaagcccaagcctctagtcccagctaagccagcattgcccaggaaaccaactctgcccgcatcagtgggcccgtcagaacctgggtctggaccgcagaagcagcaacagatccaagctatggatgaaatggacatcttgcagtatatccgggaccatgacacacttgcccaagactcccccagcctcttctgacttccccacaaccctgcctttcaccctatgctgggcctggggaggaggcctgtatgtgactatgtgggttctgcttaccaggcagggactccccagccccagtcccacatccttcttttctcttgggctatgggatggacaaggactctctgcagactgtagagctgggaacaccacaggaattaagccgtatcatgtccacccagcgggctatggaaaggagggcatttgtgagcatgtcttgagatcagaggacagtgcccccaccaagggaaaggacatcttcttcatacttgtacccactggctctgccagctcagcatgggaagtggggcttatcctgagcctaggctgggctaaaggagaacatgggacaggccactctgaactctctacttagcatggctgctcgggcccccaaggtgtgttctgaggagaaagaccagctctccaggctgccctgacccaagtcccttctcaggctcttctggcttccaatgctaagaagaaaacgtagtcccagccttgcctttctagtgcacggagggcttccaggaccccaagccttctactccctttcccacgagagggcctggccagcccatggtccttggatgtggctttcaacaaagtaggtcttagcatctcccagagtttagcccatggggtttgaggctctgaggcctcgtctgccctcaggatctgaacttgctcgtcagcctttctccagtggagccaccagccaagctgtgcccagagcaaccctgtgccttccagtagatggtgttttgtggagcatagaatgttagaatgtattctgtgtgtcagggacttttttttttttaatgaaacacatttttttttaaaacaaaatgcagccactttgttccttgggtcagttgtgcttcacagaggcattagaagggcccagttgggtccaagagtcactttcaggagcccctgagtggcacagttcaattgtttgttgccttcagtatcttgggtccccagctcctactctgtagtaagacctacaggatcagactaggagtatcaagtctgacagcctttcatctcactgtgtcccctgtcacctgcctagttctgagcaggtgtccaagctgttctgtgtaaggaccggatactctgctctcctaggttaaggtccccagagctgaggactgactctagacagcctccacccaactctgcttccctttcaccagcaggccttcaccccctccatctcttggtgcctagaactcagcccagtgcccagaagccccttcctctctgactgcggaggaaggttcacgtggcccaatcttttgtagagccaccctactgtggtccctgggcatctttgaaccctagtccctttatatccattcctgtgtgccttggctaccagctctctacctctttcatacacaccttgcacctactttgggtgacagatgacataggagccaatgggtgtgtaggagcttggatgaccatggactgatccccacgtggggtccctaacagtatctgacctgacctaccactctctagtgtggctttgcccactagtggggacttgtctgctgtggagcttttgggacaccctggcatggttgtttgccccacagatagcatttttccaatcatgacttcttttgatcactggtctgtgacctacagccagtctgtctcccagttatccagtaaagtctgtgtgtgataaagccagaatttcagtgttgttcttttccatgcctgggctgagaggagaagtggtggtggtggtggtggtggtggtggtggtggtggtgttgtgtgtgtgtgtgtgtgtgtgtgtgtgtgtgttgaggggattgtcctttgtagccagggaaggtactcttatgtctctgactctgtgtgtttctctctctctctctctctctctctctctctctctctctctctctgtgtgtgtgtgtgtgtgtctgtctgtctgtctgtctgtctgtctgtttccatgtctctgtctatttctatccccacctctctatctctgtctttctgtctgtctcttcctttctctctttgtgatggaggctgggatagtcccttgtaaccagggaaggtactctatgcctctgactctctgtgtttctgtctctttgtttctgtgtgtctctctctatgtgtgtctatctccgtttctgtctccccctctctattgccttgtctctcttttgtctctgtctctgtgtctctctgtctgtctctctctgtgtctctgtctctgtctctgtctctgtctctctctctctctctctctctctctctctggtggggggctggaatagtcctttgtaaccagggtaggtattctatgtctgctaactctggcccagccctccagactgtctcttagctggaactaggagaaaggaaggaaggaagggatctaggagatctagtttttcccactgtgtaaactgaggcagagggcccagaaggagtctctggctagtaatcactcagccaagccccgtgtggaatgaggaccccttccctccagattctcatcttgggttctccacatggaactggaagtaccatgatttcagacatgccccacctgatggatataatacacaggcctagccttgcaccccagcagcccagcacggcactgctgcatgtcgggttcttcagcatacagctctgcaggctgccacccaccacagagcaaacagcttcttagggattctcagatgtgtgcagtctgagccacccctcagcctctcttcccagtacttaggtttgaattcttaggactgagttggagtctgtgttcttgagggtgaactaacggctgttctgttctgaggactgactcttcgggagcccgcagctccagtatctccaagcaagagaaagtgacggctgggcagcagtgtgtgcttctttggggctattatgggccccgtgggcaggaagtgttgccagcggctgcatccgctgctcccttcctcccagtgttgttcttagaacattgtgaacttgggacagttctgcaaagtcccagttctggggctaattctggccgggctggcatcctgtgctctgctgcatagaggggccatttctgcatctctgttcttgcccatgtgctcaaggatcggctctgaaactagagtccttgctgcagaggctaatcacagccaagtcctgctgctctttgttcctagctatcactaggcttggtgtctacagactgccatccagagccaggctgatgtgaaaggctgtgtgtgcttagctttcgagctcgctcaccacccgggctatacgcatccccagaagaggaccacaaagccaccagtgtatctcctgcctggatgccaggtacttcccagttcagctacctctccataggctgaggacagcccagagcaggcatgatgtgcaaagtgccttggagtagctgagccctcagttctagtcttagatgcccccatggactgcagactgttgttttgagcaatcattacccaactctataccctaaggagtcaggagaaaggtggccagggactggtagagaagtgacacaaacagctagcagtcctcatgtgactctcagcactttagtgagaggtggtcaggttgggatcatggaagcttgctgctctcctaaaggatcaaagtctgggacctacaacccatgacaggttgggtttctcacagccacctgtaactgcagatcgaagggatcgtgacgtcctcttcccactgctgtaggaacctgttcacacctgtgcacaggtgtcctatgaaatgctcgcaatcgaatatgttttgaaaagattatcgcaggggctggggagatggctcagtagttaagagcacttaactgttcttctgaaggtcctgagttcgattcccagaaaaccacatggtggctcacaaccatttgtaatgagatctgatgcctttttctggtgtatctgaagacagctacagtgtactcatataaataaaataaataaatctttttttaaaatattaactcagccaggcggtggtggcacacccctttaatcccagcacttagaaggcagaggcaggcggatttctgagttcgaggccagcctggtctacagagtgagttccaggacagccagggctacacagagaaaccctgtctcaaaaaacaaacaaacaaaaagactgactctctcaattcctgaaataggatgtactttggctgagttgtagctgtgcttgaagaagcttagggagctggtcgtagagggactcttacccaaggagctgcctactaagtggcagtggccaggtggagtcatcgaggcctgtggcttccgctcagtgagcctctccgaagcactggctgttataggtgctgggtgttgtgcagtgaataaccatgatgtgcagacctcggggcccgctctgcttgctgactcctggctcttgtttccatggctctggccactgtgaggggctagagattgtactcctcaggtcaggctgagaataaagcttcagccactgacacggagatcatgcgctccacttgggttccgtgagtgggttttccctctgctgatcacgttcagaggcctgatgcttctctgccaaccccacaaacacagcctcagtcacttccttcaagaaagcttgattagctggattcctacaaccaagctgtccagtcatgtccaataccccgtctccagacagtgttcagtgggtgcctactgtgtgcagaattgcatcctatgaaccacagggcatcaggtgtcccagggaagcagaaaagatgtcaatagaataggtcagtcctatacagaaaggaccacatcgcactggtggcagcaggccgggagagtgaacataagctatcaggaacaagacaagggcatagagcatgtggtataagcagaggagttgaggcacaagtgtgccgtgtacagctctgggactcagaggacacaaaagagaacagactgggtagacggtgaacattcctgttgacctactatctgcagagcctgctccagttgtggaaatggacctgaagatggaaaatgagtcactactgttggccctcccagaagccatccagctttagtcccgttctttaggttcctgcccaaacatcaggtaactccaaaatggtcccttctctcagccacctgccagtactacctggccccagttgatggtccctgcatgggtatctgaaattctccctaacaaagtgcatctaaacaaacaaacaaacaaacaaacaatcaaatgaaagctttctgaactgttcaagaagccagatccataatgcccgggcatttatagtctccaaggatcacctcctatcactccgtggctcctggggacttcggagcaatgctgggcctgtcccagcttagagcttcatcactccggtctctgcctccagctttgagtgatgagtgccccatgtgtctccatctgcacacaggggtctctcccacatctctgtatcctaatttcccttttataggaactctagctgaggttagcgttgcctgatcttgtgcataatacactccatttcctcttaatcacatttacagcctccttccccaaaaagccatcttcaccgctctaggtagtcttaaactttggggagactctcttcagctcattgcattcacccccagtcctgagcatttggccttcacaattagccctaggcagacagtacccacttcccttttagctcatcctgcgtcttggggctgtgtcaggttctgtgccaggttctgtgcttgagcccccagtttggtgtctattctttgtgcctcctgctccaaagagctcacaaaaatgtctctgctaagtggcatgactgccttcctttcaacagggcagcacaggccgggagcattgcctgccatccagaacattgtccttgtgtggctctgcgtggctcagctgtccttggcagctggctcctgaacatccctccagcctgctccccatcatctactctcaacctctgaggaagtcagaaaaaggccccaaagaagcctggaggtttgagcctagggcttgcagagcgtgagggctgcgtgtgctgtgcactaccatctcagaactggctggccacactggtttcctgcctctggagcgcaggctcttagcttcccctgtgtttgtttccctttttgtttttgggttaatggccactttactgacttcccctgacaagggctttaggtcccagagggccatgcttttagatgagaaagaaggacaacgggtttcttgtccacctgtttccctagcatccaaggctttagagaagctgagcagacacccgacagtgacctcacttctgccccaggctggtatacaactccagtgaacttctctctggttgtctgggtggctaaggattcgaacccaggccttctggactgtgaaatccctaaaagggaggaccaaatattagatggaaagggaagctgaggtggtgctgtggagcacagatgtgactgagagaagaagcccatctcattagatgtctcatttcatacctgccactcagctcctctgagttggtctgccagcttgggtagtgacatgcttcctttgtcttactatggctcaggaaccttagaaaatggcagcacggaatcatctgacccactgaggccggggccatgctgtttggtgaggaccatggagcatgtgggaaggagggtagatgggacatgctggaaaccagccatacagatgagactcagtaataacagcagggcggtgggagtggcgacctcatcccagctcaccctacaaaggagacaagggaattttcccagcaccatggagatgaataaacacatcttcctctctctcccaggccctgaccttttgttcagagctgcaggctgggtgccactggaaggagcctgtggacagaggcagctgcatccatggatccccaccctaccccccctgcccccacatttctcctctgtagctcactcccaccaggtagcagagctagcattcagtgtgtagactttccagagtctacacacaaatacttgggcacggatggtcatggcagtgttattctcagcagtttcctgtccacaggaaacaacccaaatgcccgagggttgatggacaaatataccgtggtatatccatatatggtataacgccattcagcatggagaggaagaacttctagtgactgtggcaggctggacctcaaaacttgttaagtcaaagaagccagacccaaaatgcattgcaagatcccatttgtgtggaaatctggaaagggtaagaatgtggtgtgggcagaaagcagttggaggggttgggggggctaaggcgtgggggagagaaccaactgccagcagccaggaggaaacatttacatttcggagcaggggaaatggtctaaatgtgagcatgcctgtaagcattcactcagattctcccagctcctcgctttcaatggggcagcgtttactgcgtctaaaccctgacaatgtgaagctttgcaaagaggagccacggtccaaagccaaccctgccccagcggatccagcaatggtgcacgttggtatttatccagaggacttgaaagatttgcgtctgcacactagcctagtgtttacagcttcagttttactcctaattgctcaaacatggaagcaatcaaactgcccttccctgaatgaatgggtgaagactggtacccagacagtggaatacattaatactgtgatgagacgcactaggaggccttgaaaggttaggggagagtgtgcacactgtaaagtgaaagagaccactgcactgagtcatgccagttcagtagcacatagagggacactgcaggaccaatgagaacatcactggccgacaaagggtcaacagaaaggaagggtgagaggctcttagatcactggtcattctttacagcagagcatccacagtagggaggctatgcatttgggggaggggagaccagaaactatgaacaattgggactctgtactgtctgttgtctttctgcaaacctaagaatgctctaaaatataaaaatctatctaaaaacaagggctggagaaatgactcagtttggcaaagggctcaagttcagatccccggcacacatataaaaagcaggtatggcagtgtggacctatagtctcagtcattggagaggcacagacggccctgccctggagctcacaggccagggaacctagccaagttggtgagccttaggtttagtgacattgtcttaagaaataaggtggagagtgattgcagaagacaccaagtgtcaacatttgacctctaaagatgagctcccagtgagtgcgcgcacacacacctgcatgtatacacacctaaaaagtgcgtgcatgcgcacacacacaatctatctgagaacataaatttagaaaggaaaacaccaggagaaggtcttttaactcagaagacagctgccagtcctagaggttagccctgcctccctatatcctgacccttctctgtgctgtccctcatctgggatttaggtaagactcagcaaacatcttcctggtggtggtcaggattcttgtcccagagataaccacatggaaggaaggaactgtagacttctatggaagaacagaagtctctaaaatcccctggagaaattcagggacaaaatctccagcaggcctggaagccctggacaccagctggctttatctctgtgtgagatttccagctctcagttgagtcctcaagttgtcctgtgttatcctaaatagtcaagggtcgctggtgaggaagatatgtccagggttctccctgaagccttcagtaaatcccaggagcctaggccactgtggctgttgagaaggtaggccatcctgggcctgagtccctcatcactaccccacccacccatcccagacccctgaggtaaactatgaagttacagttctgcccatgctctctgggaagccctttggattcagtgttgggccttggcttgttaacatccaggaagtactgctgtatgacctgtaggaagcaaagaatgataactgcatcatctcagactgctcactgctgtgtgtgtgtgtgtgtgtgtgtgtgtgtgtgtgtgtgtgtctgcctggtgtgtgtgtctgcctggtgtgtgtgtgtgtgtgtgtgtgtgtgtgtgtctgtctgtctgtctgtctggtgaggtggggacctctcccttccaagcagtactcactcagctgctgacagtgacccaaaaggagtgggtgcttcactgtgctttgtttggtttcgtctcatggttacaagggacaagctaagcaagtcatttcctgtccccgaccttcagcctgagaccttgttgttgctaataaataagaggcaggctcctgctgttgctcttgcctgaggtcatcctgatcccaccccctgccactggcactggagctagtcctgaggacactccttggatctaaggctcaagggtcctgagtttaaggagccagtttgagagcctcattttaagaatagggagccccaggctcacgtggggatcaggctagcagagtgagctttgcaggaaaaaaccctaccaagctgtctggggctcccccatatccccctgcctcagctcatcaatgtttacccgtttcttcagtggatgttagtgtcatgtctctaatgcttttctagttagctcttaacctttatatttttctagaaaatctcttccttagatttcaaaagtttacattcttctcctataactttaaaattgattttgtgctatcaatagttttcagtctacgaggtttttaaaatcttttagcactatatctatgaaaaatgactgtcaccactctttctattttaaatgtatgtgaaggggtgtgtgtgtgtgtgtgtgtgtgtgtgtgtatttgttatatgattatggtatatggacttgtgtgtgtgtgcgtgtgtgtacatgcttttagaggtcagaggtcaacactgtatgtcagttctcaatcattttctacctttattttttgagtcagggtctcccacagagcctaaactcatcagttcaacaaagctggccagccaatgagctccgacttaagtacttgcatggcaaaaagttcccaagcccttctacctgtcatttatcttgtctttaatcccagcgctcaggaaacagaggcaggtggattatttgtgagttcaaggccagcctggtctacagggagacttccaggacagataaggctacacagagaaaccctgtctcaaaaaacaaaacaaaaataagtaatagatataacaataaaaagcctggtctatctagtgagtttcagaacagccagagttatatagtgagaccctgtctcagatagatagatagatagatagatagatagatagatagatattttttaaactgatagtttgtgttttaaatgtatatattagtatacttcctacttttatttagatgtatttatttgcatgtgtgcctttacctatgaagcacctcatcagcatccaatattttctctccatcaaaacacagtctgggcccctcctatttgttttatcatttatcattctcatttttgttgatttttcaacaagtataaatttaaagtttgtgtttcttattttaaatataataaattattttaaatattttaatgtttatgtatttatatttgtttcccaggtcctctccttagttttgctatccctttgtaattcgttttaaatttcattgaattataccttgtttggagggaatatatagtttcaaatttattgattatatttcctagggtttctgtattcttatttattttagactacttggcccatcatttatgagagaggatattaatacatctcactgtagtgatttttgtcaagtgcttctgggtgccattttgtgccagttctaactagggatctgcaaggtagactctggcctcatgcaaagcagggccggggacttccctgggctccttctggctttgtattctaaccagcacacagtcaatgctctaacagcacaaaggtctccagccattgccttcacagaggtacttggctcaggggctgggcacatctggcctcctctagctgaaagaggcagggtttcagttttgttttgtttgcttctacagattgtcagcaggtgccacctgccatgggtcagggcctcaggaacacctgtgagtcagtgattgctgtcagttcttctgccaaatcaggctggagagtttgaagatttatttgtcctgtcccgggcaggttaagacatccttcgtcacggcaaacctgacctctaaaaaaccgtctagaggcttccagcatgctccccagcactcaggatgaacccctgtgtctgcatgttctgacccatgaggaaaagctcagaactcatgctaactaacccgatggtggagccacgtaaactaggcccagaagtccctcagagcagtcttagttgtaaacacggggtgttttctgaggaaatggtctgcagaaatgagacttgtgtggccaaaggtaggagagtgaggggnnnnnnnnnnnnnnnnnnnnaagcaggagaatattgatggcaacctgatctctctctctctctctctctctctctctctctctctctctctctctctctccctctctctc

SEQ ID NO: 3095 - DNA, 2453 bp, Mus musculus
agatcccgtgaccgtccgcccgcccgcagccgacatgcagtccccggcggtgctccgcacctccagacaagttcagaatgcacacacaggcctcgacctgtctgtcccacagcaccaggaggtgcggggtaagatgatgtccggccatgtggagtaccagatcctagtggtgacccggttggctgtgttcaagtcagccaagcaccggcccgaagatgtcgtccagttcttggtctctaaaaaatacagcgagatcgaggagttttaccagaagctgtacagttgttacccagcagccagcctgcccccgctgcctaggaaggtcctgtttgtcggggagtctgacatccgggagaggcgagccatgtttgatgagatcctacgctgtgtctccaaggatgcccagttggcaggcagcccagagctgctagaattcttaggcaccagagccccaggggctacgggccttgccacccgagatccctctgtcttggatgacacagccagccagccaggggacagtgatgaggcttttgacttctttgagcagcaggatgaagtgcagccacccacactgggcctgagcagcaaggatgtggagaagtccttggtgggagaagaggaggaggaggaggaggaggaggaggtgctggatcccctgggtatcatgcgctccaagaagcccaagaaacgcccagaagtggccgtgaggcccaagcctgcacctcggctcaccatctttgatgaggaggtagaccctgacgcggggctcttcagctcagacaagaaggtgtctgagacccggagacccctggagaccacacaggactccctgaagctgtttgatgaccctgaccttggcggggctgtctccctgggtgaccctctactgctgcctgctgccagtgagagcagagggcccacatcccgcccagaacacggggatgcctccaaggagctgttcagagttgaagaggacctggacctgattctgaacctgggatctgaaccaaagcccaagccccagactaagcccaagcctctagtcccagctaagccagcattgcccaggaaaccaactctgcccgcatcagtgggcccgtcagaacctgggtctggaccgcagaagcagcaacagatccaagctatggatgaaatggacatcttgcagtatatccgggaccatgacacacttgcccaagctcttctggcttccaatgctaagaagaaaacgtagtcccagccttgcctttctagtgcacggagggcttccaggaccccaagccttctactccctttcccacgagagggcctggccagcccatggtccttggatgtggctttcaacaaagtaggtcttagcatctcccagagtttagcccatggggtttgaggctctgaggcctcgtctgccctcaggatctgaacttgctcgtcagcctttctccagtggagccaccagccaagctgtgcccagagcaaccctgtgccttccagtagatggtgttttgtggagcatagaatgttagaatgtattctgtgtgtcagggacttttttttttttaatgaaacacatttttttttaaaacaaaatgcagccactttgttccttgggtcagttgtgcttcacagaggcattagaagggcccagttgggtccaagagtcactttcaggagcccctgagtggcacagttcaattgtttgttgccttcagtatcttgggtccccagctcctactctgtagtaagacctacaggatcagactaggagtatcaagtctgacagcctttcatctcactgtgtcccctgtcacctgcctagttctgagcaggtgtccaagctgttctgtgtaaggaccggatactctgctctcctaggttaaggtccccagagctgaggactgactctagacagcctccacccaactctgcttccctttcaccagcaggccttcaccccctccatctcttggtgcctagaactcagcccagtgcccagaagccccttcctctctgactgcggaggaaggttcacgtggcccaatcttttgtagagccaccctactgtggtccctgggcatctttgaaccctagtccctttatatccattcctgtgtgccttggctaccagctctctacctctttcatacacaccttgcacctactttgggtgacagatgacataggagccaatgggtgtgtaggagcttggatgaccatggactgatccccacgtggggtccctaacagtatctgacctgacctaccactctctagtgtggctttgcccactagtggggacttgtctgctgtggagcttttgggacaccctggcatggttgtttgccccacagatagcatttttccaatcatgacttcttttgatcactggtctgtgacctacagccagtctgtctcccagttatccagtaaagtctgtgtgtgataaagcc

SEQ ID NO: 3096 - protein, 396 aa, Mus musculus
MQSPAVLRTSRQVQNAHTGLDLSVPQHQEVRGKMMSGHVEYQILVVTRLAVFKSAKHRPEDVVQFLVSKKYSEIEEFYQKKCYPAASLPPLPRKVLFVGESDIRERRAMFDEILRCVSKDAQLAGSPELLEFLGTRAPGATGLATRDPSVLDDTASQPGDSDEAFDFFEQQDEVQPPTLGLSSKDVEKSLVGEEEEEEEEEEVLDPLGIMRSKKPKKRPEVAVRPKPAPRLTIFDEEVDPDAGLFSSDKKVSETRRPLETTQDSLKLFDDPDLGGAVSLGDPLLLPAASESRGPTSRPEHGDASKELFRVEEDLDLILNLGSEPKPKPQTKPKPLVPAKPALPRKPTLPASVGPSEPGSGPQKQQQIQAMDEMDILQYIRDHDTLAQALLNAKKKT

SEQ ID NO: 3097 - DNA, 53282 bp, Homo sapiens
cttcagtagattttcttggagacctttgtggacacatgagatttaaaacaaacaaataaacaaacaaacaaaaaactacttttggaaaaaaagctgcggactctttgtgcaataatttggaatgcccagccctccagtcttacttagatagagctcagggtttctgttctagacccacaatgattagaggaaccaaattatctgccgcctgggaagataggggctgacaggaacagagttggaggaactagaagatgtgtccacagtctaggatatgagacttgcagccacccctgaggatgacaatattgggaacaaatgatccaccagttcctgaaacagagtgttgacccggaggatcacagggctgaccggatcctggtgtctggggattggctgtctcagctcttctggtccacatagtaaaggtgtctgtgagatttgtctgcaggaggcagtctccgaggctgccccgcaaagaacgaggcacttacaaaactgggaacctggccctaggctatgactcccccatgtgccctctcaccctcatttcctaggtagcagatccatcctaaataaggtgttaatttagggcaactaaaacagagcccagctaggttctgtcctccaagtcttcattcctggtttgaatgaggagctagaggactctaatcaaaatgcttgtcctcattgctggggacacaaatctggaagttagtaaaaacactgggttacagaatcaacatctaaaaagtcattagcaaatcactgcaaaattgaaagaataatgagatagcacttttttcctctctaaatctagcaaaactgaaaaatatgaaacccgttattggcaaaaggatgggcaaacgggcacatctacatatacctttggcaggaatataagttcgtagagatttttcaagaacatggatcatgaaatacaggctatctaaatttaaaaaaaaaagatttttcaagaagagcatcaacattttaaagaaggaaaggctttgattcagcacttttacttttcccttgtaaaaatgttgtttcatttatagctatacttgcacacgtgaagataaatatacaaggtttaaaattgaggtgataataaaaagtggaatagatgatacttaatctagtaaggacaaaatgataatataccctcagagtgaattatgattcccccagtgtgagactgagttagatccacatgcatggcttggaaatacgccatgatatattatactgagatacagggtgggcagaatagagaggtggggcaaagggctgattctcagttgttcacacccaagccaaagccacacggatagacatgtttctgtctgcctgtcactgccctgccaccccagccctcaaacctccttgggactctctctttcatctttctgcttttactcacattttacatcgtcaaacaataaatcctccttggagatcttcattatcagatatcaaaataaaccaattcccatatagcactggaaggaggattgacagatcacgggaacagaatagaatccagaaacaaataacaatctttgaaaatatgtagaaaaatagtgacaattccagtgagggaaaaggatgacttgtttaataaaagttaccagtgaatgacactagatgcttgattaagtatttagagggggaaatagactcttgtgacataaaccaaaattaattcctagtgaatcaaagaatttattagagactgaaactattataagcgtatttggagaaaatatgtaaatatttatacagtctgggtaagggatacttttctgagttcattgcaggaaccagcaagaattatgtccatggttggagcttcataaaaatcttaaaacatgcttgtaagaaaattctgaaaacagaattgaccttaaccaaataatcaaacttaatgtcactaatcatgggggaaattggcatcacgtgctcttgaaagggattcctcagtgtggcacttctgccaaagattcatctgcacctaacagatgaaacaattagacaaatccaaacagaggcatattctgaaccactgacctaaactcttcaaagatatctatgtcatgaaagatgaaaaagcccattttagaataaaggagactaaaagaacgtgataattaaatgcaatgcaggattttcagttagagtcttcactgggggtgggatgtcaggatgggaaggtatggggagcatttgttagtaaagacattgtttgggccgggcgcggtggctcacgcctgtaatcccagcactttgggaggccgaggcgggcggatcacgaggtcaggagatcgagaccatcccggctaaaacggtgaaaccccgtctctactaaaaatacaaaaaaaaaattagccgggcgtagtggcgggcgcctgtggtcccagctgcttgggaggctgaggcaggagaatggcgtgaacccgggaggcagagctcgcagtgagccgagatcccgccactgcactccagcctgggcgacagagcgagactccgtctcaaaaaaaaaaaaaaaaaaaaaaaaaaagatattgtttgaacaaatggagaaattggaacacagatggtatgttagactgttgtatctatgtcaattttcctgagcatgatcattgcactgtggttatataggtgatatggttaggctttgcgtccccacccaaatctcatcttgaattataatcctcataattcccacgtgtcaagggagagaccaggtggaggtaactgaatcatgagacagtttttcccatgctgttctcatgatagtgggtgagttctcatgagatctgatggttttgtaaggggctcttcccccttctcttggcacgtctttctgctgccttgtgaaaaaggtaccttgcttccctttcaacttctgccatgattgtcagtttcctgaggcctccccagccatgctgaactgtgagtcaattaaacctctttcctttataaattactcagtcttgggtatgtctttatagcagtgtgaaaatggactaatacagtaggagaatgctctcattcgaaggaggtatatgctgaagtattcagaatgaaagatcattatatctacaactaactcttaaatgtttcaaggaaaaaaacacagaaacagagaaagagagggtaaaacaaaggtggcagaatgttcacagttgtgcagggcatctgtggtgtacagcccagctgccctctggggttgagggtggggtgctcagggactaagtgcttacttactctgcagctgctgagaaagctggcagcctgcagccctgcttaccctctctgaagacagggaggtgtagcacccaaggtcaggtagcctacatccagtgacttgtcaatgtggagtgtaaaagccccatccccacctcctcccaattcaggatgacctggcagggccatgccagctccggagctccccctgcaaagggctgcggcctctgccatgattgcagattgcatcccaagttagcactctctgcccaggtaattcctaaaaaacttcctgcccatcaccagtctccatctgagccagaatcccacctgtgagactaggggaaggggtcacagatgtggttattaacccttcaacatttctgtgcctttgaaacattctcaaaataaaaacttaggggaaaagtagttaaaagacaaacaggacaccatttatcacaaagggttagtatctttaatgtgtaaagcattcttacagatcaacaagaaaaagacaaatggagcaagctttttctcatgtgcaaaggaaataaacaggatagtcgcaaagaaacagaagaccaacaaataggagaaagatgctcagccgcacctgtaatcatataaatgtacttaagcaagaaagagcattttcacttctcacacttgagaggatgtaagaaaatgaatcggggctggcgaggtttggggaagacgtgcctcattcagctttcctgagcacagtttagtagagtgcagatgtaaacccatctaatgcatcatgtctctgtgcttccaagttctgggactttctacaatatccaaacaaaatagctggatttgctgtgcctcaggcaaagattcctgaggatccctagagcctcgcttccacagtcagtccaagcttcctgactcctgttgactagccacttccaggactgtggtgcactgagtactagacgccatttccctgagacgagggtgcatagtaggccctgaaggtttgaggtggggcgtcttggacagagcagagcaggactcagtggagccactaaatgccacccaccaaggtctgcagccttagctggcctgccctgggcctcctccaggcggctgggccccacgccccctccacaagccagaccaccacccagagctcaggagccgcaggcagacaatgcctcccaaattcctttacaatgcaaagcgatgaagcactgtctcatttctcccaatcttccaatctcctctgctgttcaacaatagcaatgcacactgaaagactcaagaaacaagtttcccaaacaagttggcacttttctcccaagccttcttcctagggatctggcctaaacaccagccagcacttcaaagatcatccaccccgctcagtactcctccagtgcaccagctttccatcacatgtacacagcttaaggaccagagaagtcagttattctccatctgcatatggtattctaaggagccatttaaaattatggttttggaggtcattttacatggaaagatgtttacaggatggtaaatgaaaaagcaagttacaaaatagtatagctattaagattctgtattatttaaaaaaaaagacttatgtataggcatagaaaaaaatgtcaggagagaaggaacaaaaaattagtacaattgttatatctggtatagaatgagaggcgatttttattttttaattttactatccctattttccagcttttctaccatgagcatgaattatttctacagaatggttccaaaaattgtctgcttgtccccctctggaagagggggccctactcccttctccccttcccacctcctgtcccctcctccacccactgggacactgccctcctcgaggccagagaacacttttctctcttcaaagattctcttcttgaccaaactgagctttgagctcctgaaccttctcttagacctatgcatgcacttccttgtaaaatccagttttaggaagaacgtggctaagtcaggttaccaacatcctcccaccctgcctatctgatcaccctcgatatccaactgggttccccctcctccaccatccccaggtgatgtctgaccatcctggcccatcttcagcaagaatcctgttaggtcggcatagccagagtccccccatactcgtcttagtaatgttccagccaccactcccaccctgttccttggctataaattcctactttctcatgctgcattcggaatttagcctagttctatactggggtctcttacccctattgcagtagtcccaaataaaatctgctttcaccactttaactactgttcagttctgtggggtttttttgtttgtttttcttgaacacctccttatcttcctggatgttcagcagtgtttggcattgctgatcacaccccagtctcttcccgaaacactcttttccctttgttctgtgagcccactccctccttcttcaggataagatgtgagctcctttgcatagcgcacaaggccctctatgctgcgggaacacaggctcctcttgccctctgctgcctcctctcccagcaatccttccacatattcttctcaccagctcctcagatacgctctggttctatcaagacgtactaggctgagcatggtggctcacacctgtaatcctagcactttgggaggctcagcagggcagattgctcgagcccaggagttcaaggccagtctgggcaacatagggaaaccctgtctctacaaaaaacacaaaaattagctgggcatggtggcacacacctgtgatcccagctacttgggaggctgaggtgggaggatcacctaagcccaaggaggttgaggctacagtgagctgtgatcatgccactgcgacagaatgagaccctgtctcaaaaaaaaaaaaaaaaaaaaaaaaagacaagctgccttcctagtacacattttacctcttttcttcctcctcctcagtcatccctgcatcccctatggagcagtttttatgtcaggcattatgtaagtactttacaactacaccaacaggaaatccactgcagaaaacccccacttagagtgatttaggcatttatgcaaggagaactttgtagaaaaagtccagggcgtgtatgcaagctcatatgccatcagctccccaggcttgttcatccctaacatggtagactccaaactcatgtctgtgcctcctgctcccatgatggctgctgtgtctccaacactgtatccccttcccaggtagaagacaaggaaggagcgaagagttttctcctagcaagataaatcctccacagggacttaagtatatgtggtcagttatgtcacatggccccttgtaactgaaatgggacatgtgttttacttctccagcctctatggtaataaaaaccaggaagaagggggttgtgaatggcttccggttagctcatcaccaatgcctgccatacatttcatcttgtttcagtctcattttacctcatgtaattcaagcaatgttatgatttaaaggtttctgttacgtgcatttcaccagtgagaaaatcaagtctcaaaaaaataatacctactttttacaacccaggtctgccatcacctcctcctggcagaattctttgtatgcccaaccctaggctgagttagttatgtgccctcctctgtgcaccatagcaccctaggcgtgcatccttgttgaaatctccagctgtcctagagtggcctgtgagcccctgcagtgggctgtgagccccacaggataaggctctgtagcccccaggcctggggagataacaggcctggagctgtacctatgagtgtttgctgagtgacaagcaaggtggtggccctgctccatgtggatgtgcccagaccctggagctctaaagtatcacattagggaacagagacaaattataaggtcccagaagacccgagccaccatgggaaacgttggtgcatggctcagccagagttcagagcaccccctgcaggctgcgggtgtctctcagtgaccacagtgtcctgaggcccagtgacttcctgggtggaaactgaggcctggagtgttcctcccagggcagtgagaaagagagaaatagaaaatcctttgcaatgtggtttgtgttaccgcagcttcagccatggaaggggctccttgaattaaacaggaagcagaaaatatcagatttagatcccacattccatgcattgtatacaattacgcgctggagccatagaggggcacgtgggacccacagaggcagaaaatgggattgctgttgggaatggggtcgttctttcatgggaaaccagttgcattcttgacaggtgggccgagtcttcctgaggtgcacacttcacaaccccaggggcacaggtgaggccctctcatttgcttacaaggcattggtgacagacatgctaccagctcccacaatgatggagagtccccttctctgcagccccccaacaccgctgcatatctctggattgtagaccatccttggtgggctcaccccaactctcaggctcaacagcctcctttttacccatgactcctatgtcagtctccagcccaggtcggcttcctgaggcccagggccataaacccaatcgcatcaataggtccagcccttcaaacactgcctgtctgaaacagaacccatcatcctaccaaaaatatgctccttctccaggtgccctgccacagagaatgataccaatgtccagccactcacaagagccaaaccatagtggtatcttatctcttcccgcccacacccattggattcccaagtcttgaccaactccttctcctaaggccctcttacccgtcccctcttctccacctgggtggccatcaccctagttcatgggaccattgtctcttgtctggattgttctgcagtccagctcatcttcataccttcaacatgctccaaaaccctgcccacgccctagctggcccagccactcctatgtccctgaccctctgatggcgctgtgttggcctcaggatcaggcaaagccctggccttggtgcactaggctgtccacaccctggctcctgctggcctcttccccctgttccctggtgttcctatcctgtcgctagggctttgcacgtgacattccttctaatctattctatccatatttcttcaggttttcccttggacttcagctcctttagaaagcctttccagacccccacccactccccatgtaggagggcaaagaagtccactgaaggcatctaaagtgtcttattcactgtgtttctgtctgttggataaatgtgagtgcaatggtgactgctcgactgcctggcactacactcagactcctggaatgctgaagcctatactgctttctgtccagaccctgaactccctttctctaaagtagggcatgccaatttaaacaaaacacggaggaccatttgcagccatgaacacggccctgcagacggacaggccgatgagcagcagagcagacaggggttcccgccatcatcccagctcttcactgcagccttcaagggtctccctcagaactttcattcattgtcatacttcattcatgattgctcatcttgcctataaacaaatctgagacaaataataaggcatatcaatgtccgtatttattcaagagatacattggggaaagtcatttttcaaaatcttttactgtaggatttcttcactaaaatctgtaaaaactggtagatattgttggtgatgctggtggcggtggttgataggctcaggaaacatggctgacatcgccctgccgtgaattctggtatagttaagcccagcttctctttctttttgtcactggggctctgggtggagggagtaacagaacaggggcagcagtttgcaccttctgctggccctgtttgcagactcagcttttctttccctgggctacgttggcaggtgatacgatctctctgttcctcaccccatggagaggtgaatctaaaatgagtgggtctgttagggtctgcatgtctgtacgttccccttctgaggggaactggctcctggaccccgttgccctgctccagctggggacccaagtgcagccatcccaggcaggcccggccccgggaggcctccaccagggctctgccaagcagcagaggctgcctctctaaagatcccctgtcgggagagtgcctgccatttatggagcgggcaggcagtaggaaccagataggcgagctagctggaggcagcaagctcaaggggactgggctgctgcgtggcgttcactgtgcagcttgaagaagaccccacgaagcctggacagagccccagcttggtaaatatttgttgaccgatcggttgaatgaaatggtcttggggcagagggggagtggttttgtaatggggactggcggcggaaacagcagagtcccgtctctctaacggctaaactttagcgcaaaacagacacaccgattaaggttcaccgtgtgccagggccaggctgggcttcttctaggtggttgcggcgggcgcggctcagcctgggtgctccggaagctccgagcagcgcaggccgacggcgaccgtgcgggacccgcccagccgcgcttccgccccgcctctggccacaggcgcgaactgcgcggccgctgccaccagggggcaggccagggcagcgggaggcagggcggggacgcggtgacgcgggcactgccgggtcccgtgactgcgcgccccgcccggagtccccgccgccgtcatgcagtccccggcggtgctcgtcacctccaggtgagccagacccccgcgccccacaccgcacagctcgcagtccggggcgcccgggcggagaggcggggggaggccgccgcctcctaggccagggacctggtgcaggtctccccagcgccctcggtggcttatccgggctgggcccctgcaccgccctgcaggagaggtggcgaccccgatttacagatgaggaaaccgaggccctctggagggtagagaactagccaaggacagcgggagccctgggactgactggttcagtgcaggcgggcgcagtggggactctgctctcctttcctaccgccttgggttcttctcttttgagcccgaaaatctagttccccatcctttcagagctccctgagtcccaggcccggtgctgggcactggggacagaggcgaatcagacaagctcgccctgcagggggctgcagcggagagggggtgatgccagcagcgggtagtaagctcaggttgccatgggaacacagtacagggcaggaacccggtttctgggaggatgagtttgatgagagaccagggagaggtcgttgctgcttgcgaggcagctcaggagagcgcaagttacagcaaaagccttggaggggtccaggcggaggatgcagaatgggtcggccctgatcgagacctggaggacccagcccaaggtggatcctggcaaggctgggaggcacgtgcttttacttctttccgcctttaaaacgctgtaaagtgatttacttcaaatattttcatacacttcacccttgctctccctacacaaagtcttaggctaagatgccaatttatgacataaatgaacgtgttacccagccaactgttgatcttccagttgtaatcaggaattccccgtgacttcaggtctagaaaggtatgattccttttgtaaaccctgatgtcggaggctgcttggtctttcatgatcaagtgtggttacagttgtatcttcatgggcagaagaggtttccctactgccacttacgtcacctcctctcaccaagcctcagtttccttttctgtgaattggaggtttcagattggcaggcatgagcaacgtcagtagtatatgcccctcagccatgtgcagatggatggggtgtgactttggtgctgggtgcttgggatggggtgggtggcttccctccctgccccgctgcacagcctggacgtggcttgttaacagatgtgggggcgctggcggtggtaaggccacatgagtcaggctcatttcttgctgagggcaccagcacacccaaggatcttgcctgcagggtgagtccaaacgccttagcccagcagcaaggccggcccttcccagtcgcaccccagctcctctttccagcccgatctcctcccacatgtcattgccacatgcactcaagcttgaattcagccagaaggtgtttatcgagagccttctctgtaccgggtactggccctagttctaggagacaaacaagtccctctcgtagagctttaatgagggcacaggcccagtgggcaaatctacgacatgtcagggatgatacatgctatgaaggaaaacaaaacagtgggggcaacagagtggtaggaggcatgcatgctgttttctatggtgtggtaaagaggcatctttctgatggagtggcgcctggacagatcccggacaagctccatgagggagagagccatgaaaaagaaatcttggaaaagtgtgtactgggaggacaggacagcaggagccagggtcccgaggctggtatgctggagtggagtgagcccagggagagtgttaggtgatgcggtgaagaggcaagcttgggagtgaaggatgatcaggaaaggccgagaaggctgtggaggggccatcagatttaatttcaagtgcaatagggcccaacttctggtttatagagatcctttggctgctatgctgagcatgggcagtggccgagctgagcattcaggacaggcttgtaggtttccatgtagagccggtggtggcttggcccggggtgatggcggccgtgagggtgagaaatgtttgggttctcgatatattttgaagattgagctttcaggtttgctgatgcttggatatggggtgtgagaacaagaagagaagttaagactaacggcaagtctctcagcctaagctgctggaagaatgaggctgccctttagcaggcttggggagaggtagaagcagcatttgtgtagacaggtgagttttgagaagctcgttgacagcccagtggggatgtcaggcagctgcagctggaaggaggctggctgtgaggggagagtgagctaaagatgggagttggggagccattggctcggaaatggtatttaaagcctggagcctggatgagatcacctggggaggggtacagtgagaggaagaaggagggtgctctggatgctatcaaggggaaccatccaaagcagttcctctcctcctgtttgagcaagagtggccagggtgggcagagaagaaccaagagtgagggggtgctccagccaccagtgaaggcagagcttgaaggaggggagtggctgactgtgcccactgctgctgacaagtcagaccagaggagaaatgaggattcacctttggatttaaccacatggaggtcgcagatgacctgggcgtgggcagtttgttgcatgatgaggaccaaagtctggctggaaagggttcaagatcaaacaggaggagaggaacccatgaatatggggccctctgttgaggagttctgctggaaagggcaggagggaaacggagcaaggggaatgtcgggtcaaagcacagcttttgttacatgagtggtcagagcatggttgcatgctaataagcgtgggccagtaaggaaggaaaatcgatggtgcgaaaaagaggggtgagctgcagcagctatgtccttcagtaggtgggagggcctcggagccgctgccctggtagaaggttggccttaggagcagccagccagtttgtctacagtcccaggagagggcagctatcagggagcagctgcaggctgatgggcagatgtgacagcgaagcctaggatgttctccgatggtctctggagcagtacacagcagtgtccacatcacttgggaatttgctagagatggtgagggcacaccccggggcctgcagaaccagaatctgcatattaacaggatccccagggggttgcacgcacattacagttggagaagcttggtctagggcacatcctgcccaccacacccccatttgtttatgtactctccgtagcagctgcagcagagaccagataccctacacagcctgaaatatttgctatctgaccctgtagagaaagttttcctatgggttcagggaagtgggagggtgatggagtaggcccaggtgcatcagactcgtcggagggcttactaagaaaacaagatggctggccaccctaggcccgaacatgcctttcttacaagttcccaggcgatgctgatcctgatccagggaccacactttgagaaccccacatctagggcaaggtagggttgccaagcctggtgtggtgttgtgccttcaagtctgcagccatgaatttcaatgggaccaggctgcatgtttacaccatgtctgtccccagtcacgttgagccacttgggcacagggtgaaggaagcagagaactggagaagtgggctttgaccaggccagctcagctctgggtaagaagtcaggggagctgggcctaaggcagagggattccagcaatggaatgggaccctggaaaaggggtggggttatggattgtgggttctggcgtggtcagagaaccattggatgtggggtgctgtgagggagctggatcgtgggaggtgcccatctgggtctgctccatccctttcccacccctgagaggacctccccgcagctcaggcactgcccttcttgtcactttcaaccccctgtgcctcgttttcatcatgatcctaaagaaatgatgcctggcttctttctcatgcctgccccataagaggccacctgggctctggagcagctgcctgggattgaacgcagctccacctcatgccgggtgagacctgggcaggcactttccctttaggggtctgtttccctgtattttaagtgggtctgggtagcagagctccttcgcagggttgcaggaggcggaagtgacttcacacaggtgcatccctagagcccagcgcgtctcccctcagcatccagcctcaccttcctcctccacactggtggcagtgacaccgtgggtgacaccaggccgcgcgtgcacactgcgtgaactcggtgccgttggcagagggctggctgtgcgtgtgcacctcccagtgcccattcggcccttgctgcacttttcaccacctgaaggcaggttgcctggggtgccctacgccgcgggaggatattccttgtgtgtacagcacgcagtcattgggtgtcacacatggcataggaggcgcatcactgtaggcctcaccagttggtgacagcagcgttgtgctggtgacagcgtggcctagcgtgggatgtgaggggtccgtgtgggaggagtgctggggcagggggatttgatggattggggtataattccagagagggaagggccttgccccagacacaggttaagctccagaagctcctcccgtgttttcagggtcctgcccagcacacaggaggtctcacctcgatggtcagagctgctcagagggtgccccacgtgtcctgccagaggtgtttgcgtgagggatgttagtctgcacaggtctgtgtctcaccttatgtaggatgagggatgtatttaataactttttccacttcaagaaaaacatctcatcacttctttgctcatcatacaattcattatattcgaattgcattttacaaatctccaagagcggtgatgttttgccgatgcatcctctctacacctcgaggggcagcatcgactgcccagatgagggacgggcctatcagtgcctctctgggccacggtgggtcacaagggtcctgcctccagtgctcgtcccgtgtcccccccagggggcctgtagcagccctcctgcccattagccaaagagaggtgcctgtctccagctgggatttcaatcccttgctgtccctgcagccccaggcatgttccttggtctgagtagaggccctaggatgctgctcccacccattctgcacagagtttgtgtcgatccctttcaacaagccccatcctttcctgttttcctgcagggagcagacctttgtccctgagcaacccaaaggcaggaccaggtccgaggcctcgaggcctgggaagccaggcttatgagggctggtgtggcgggatgggtggcctggagcagtgaccactgaggacagccagcagagtcacctggcacccaggcctgccaggcacccagaggccctgcctgcactttgctcgggaagcctactgccttgaccctgaaccccacctgccttcttttcccctggcaggcgacttcagaatgcccacactggcctcgacctgactgtgccccagcaccaggaggtacggggcaagatgatgtctggacacgtggagtaccagatcctggtggtgacccgtctggctgcgttcaagtcggccaagcacaggcccgaggatgtcgtccagttcttggtgagccggaggctctggccaggatgtttcgagggtgcccggggtccgggcgggcagacacatctgcccaccagggttcaagtagcatccagagcaagtgcttctctgtctgttgcttgctcagggcctggagtaccagaccatgctagacagaagggacacagggtgaatcagacgctctcagtccgtggagaggcagacctctaaagagacagatacagatggggacaggagcacctggggggctctgggggtatagagaaggggcacctaactgaccctggggaaacttcttggaagaggcggtggctgagctgtgttttgaggaacagatggggctcagcaggagaggtgagaagggtgtcccgggcagacaacacatcctaagcaaaggcacggaggttggaaataggacattgagtgggaactctgcacagttgagtgtggtcctgggaggaagcggggaagatgaaggtgagtgacaggcaggatccagattgtggagagtctgcgggagcctggacttaacctgcagccaaggagagttttaagcaggggagtgacgtggacccttttgcctttaaccagccaatctgctgagagcatggagttggattggaaggaacaaaacaggtgtcagggagcccagatacatggccaatatggtcattcccaaatcaagggcttggagcaggccagttgcacttggtatggaagggaaagggagagttgaaaatgtttactgggtaacatgcaccacatttgctgactgtttccaccaactgaaataaagaatatgatggaggagcagacctagggggcatgtggagtgtgaagtgtctgccctgtggatggatacatgaggctggagctcgggacgagctcaggcctgagatgtaggcttgggagtcatcaacttggaggtgatattaaaaatctgggagtggatcaagttgcccagagaacagaagtggaaggcagagagaagggctgaggaggaaatcctgaggatgccaggggttcagggactcttggggagaaggaggagtctgcagttgaggcagagaggagagaactgggtgggtatctacggagtcagaggagctaagggaggagagaatttcaagagggttgagatcacacactcattggcttattatttaccatttggcctcttgtgaaaaggacctgcagctggagaccaagagacacaggtccaggattattaggacaaaggtgaaatgaactagaccccgaagtacagcagggagtgacacggggctagcttggagtctcctggcaaccaagataaaaagggaaacgatgagttgcaactttctggtgacctgttgaaagagacactaaattttaagagaaatttacagcacaaatgtttcctttttttaagagataggatctccctctgttccccagactggagtgcagtagtgtgatcatagctcagtgcagcctggaactcctgggctcaagcaatcctcctgcctcagcctcctaagtatctaggactacaggcacacaccaccatgcccagctttttcttttttaatttttttggtagacatagtgtcttgttatgttgtccaggctggtctcaaactcctcaagctgggcttaagcaatcctcctgcctcagcctcccaaagtgctgggattacaggtgtgaacccccacgcccagccacacaattttaagggacattcaacaacgtcatgagaagcgtctagaatagcaatgctgtttttcatttgattgctcctgtggccgactcttggtgagaagcaacgtgtgatgtcaggggtgattctgggcctgcattgctctgagagtgaatctgctttacagggtgctttgcagctcctggtaatttgacttgatccaggttggagctcaatgcacccacattttcagagacaggagcagaagaggagagtatttgagcttgatgttgcggggcatgaaggagggagcattctgggaagcttgggcttcagccgcccagcccacttggttctgtgcagagggccggccttacatgcaaggtgtacatgagggtgttttaacacctccatgaatcacactagtgccactttttcctaggcagtgacgcccactcctcgtggagtgtgtgcgtgcaggggcttgtcagacatttgaaagtacttgcgagggcaaagaactcctttactccccatgggatctcaggatggagcctaaagttacatacccccaagcctgaagtctctttgatgtttcatgaattaactcaaagaattaatgagcattttgtatctacttaaaagggcatatgtgttttaatataaacgtgtactgatttgctgaccatggagtaaaacagccgcaggagggggcaccgcagtggaggttgtgcaggctcttggatgtgctagcagtgcagacacccacaagcttactaacgttacagggctgtctgccccgtgctcagcagtgcctggcacacgggggcaccagataaatgtgagttctcaaccttgagcttcctctgctcagggtctcttacttggcctcctcttgttgctggtgcagatgcccacccaagaagccctgcctgaacccctgatggacgtgggccctgggtggggtgggagcccaggcctacagctccggagtactcacgatgccagtgccctggagatggaggttccccgagcctggatatgctgggtctgtggtctgagcctgagtggagcagtcgggccagcagggggcgcccggcccccaccgtggcctgctctgcgggccgggctggagtcacagctgctgtcggagcctgtgttagcaatcgctctgggaaggggtccgtgtgcctttccctgagggctgttttcaggaaagtctggagccaggctcttgtgctgacaactgcaagcagcacctgtcccaggtgactccccactggaggttctgaaatcccccccagctgcctcctggtatcttgacccttcacaggctgggcattctgggtggtgttgctggagccaaggatgtgtgttccagacacaccctgcaccaagggatctccccgagcccgagggcgtcagatgcccgcagcccctgcacgccagcactccagtggcacactgtgggcacagtccgggcctgggagcataagagtgagtgacccacacttcagtcgggggagacaggcccagtctatggggaaagcacagaggagcgaggagtgagggtaggtgccaggatgatggtgtgtgcatacagcaggtgatagaggagctaggagtgagggtaggtgccaggccgatggtgtgtgtatacagcaggtgacttcgctgagcacccacatggttacagacacggcgatggcactgaaaccactgtgagactgagagcctgctggggtgtctctgtacagagtgaacatgcagcaagagctccgtgagtgaaggggtgaaggcttagctgcccaggagctgtggggagaggccaaggaggcagcgggagtcagccgctggccccacgggaagctgagtgctgccctctctgagtcagatggtgctcaaggctgccttctgatgacagcaagagtcctggcctgcttgactcgggtgcctgcgtgcagagaggtcctgcctgacgcagggcagagaacaagccttggaaatatctgtctccactgcttgcattggctggcccgccgaaggccacactggttcacgggagaatgaggttggtgctgagaacagatgattcacggtgttgcaggaagatgacctgccagccggtgagatcaccctcctgatatgcagaaagctgggaatgaacacagtggccctgatcacgtgcaggctgggcaggggtccctgtatcaaatcttgttaactggacctgtgacagtgttcagaatggcaccgttattgcatctttcctctgggccactaagatgtttttattgaatctgctatcggccaggcgtgttaaggactggagcctgaggctgggagacaggcagaggggcagcagacgggcgtacctggcacacttcctttggctgctgggccttgggaacccctggtcggggtgagaaaggagcactgcctgccactcttcactcaggaaaccacatgctcctctcattccaggtctccaaaaagtacagcgagattgaggagttttaccagaaactgagcagtcgttatgcagcagccagcctccccccactacccaggaaggtcctgtttgttggggagtctgacatccgggagaggagagccgtgttcaatgagatcctgcgctgtgtctccaaggatgccgagttggcaggcagcccagagctgctagagttcttaggtacccaaggctctgccccatgtccctcaggtctccccggcccagaactaggccccgctgccgtgccccagtgggagcatgtccacagctgcctctgcagcctggaggcttcagccaggctggtgaggcaggtggcctcgctgacatccttggctggatggtgggcagaaggaggcctacccttgagggactgaacgtctggctgtcaggtgggggctcacacagcaggcattctccatagtgtgaccccatccatggccttcctggccagccccattcctagagcttgcccgacaccccccgactgaccatgcaccacacacaaccccctgacacacaccccacactcccctctgcctcctccaaccagccctagggacctgcagtatcccgggaaagctgtgttctcacagcctggctggtgacctgcccctggggacatgtgcttctcacctgtgcccccacagagagggtcatggggacagctccgggctgaggaattgatccagcacccctgcccccagtggtggagacgtcaagcccttcccatgggtgtcctggccctgtcttctctcctcagttttctcatctgtaaggtgggagtagcctggctgataggccgttatgagaatttacagagctaacacatgcaaagtccttagaacagaaacaaccacagtaaatagtggctacaattttaccccactcctcggttagtcctgtcaacccagaacccccgtggggcaggccctggtctcacagatgcccccaggacaaggcaggttctcaccactgctggtgccggactcccaccccttctcccctctttacatccgtctgcttaactccttcccagctactgtggatctcctagttccacaagacagaagggaagttttcaaaagaaagttgaccgtaaataaaacaaattatttaaagtgaaaggtggggaagagaagcaaaactggtgaatgcgcaggcctaggactggacaagctgcacagccccggtgtcctgtggccatgttgggcccctcacatgggtctgggttctcttctgcccttgttgttccaaggtcacaacccttccttccttgcctgtctctggggctgggtagactgtgccaagaggttccagctcagccatcgctggaagagatgctcaggatgtcccagcccctctctggtggagaggcaggatagaaacacaagctgctctatgcctcactttgctcatctgcaagatggatgtacagtagggatctctctcatagggcttttgtgatgtttaaatgtaagatgcttatgacatgaaattgaaggtttgggagattttgaatggcttttcacatttgtccaagtaaaataacagagcatcacataatacgatatcgtcattatcactcagtgcatcctgtatgccagacactctctaagttctttacctacaaggtgattttattaaaagtcagttgttttaaactacccagtaagcacttggatagaaatgaacaaatagtctgagcccacgcttctcaaactatctgtggcaagggctagctcttttattcccagcctgtcacagatggatactttcacaaatacaaaagcacacttgggtattgtgatgatggcagcatgctatgaagtttctggatgcttgctctccctttctctacttacctcattgtggtcacacagggggcattctctgtctgaagaccacacttcaagaagcgctcatctaagccagtttgtaatggagtgattaccgtttgttctggaatcttccacatgcttaccctgggcacccatccagtccacagtccaggtgcccagactctcggggcaggtctctgtctgcagagttccttgccgtgcctccaactgtaaatggttctggctgtactggttctttttgaatcaccctgtgccctggctgttgtatcccaccgctcacccgggaggagggtgcagccatccctgcggcgcacacaggctctgggccttgggttcaggaaccgctgcccctgtcttgctctgaagctcccacttgtgaccactccactccaggcttccttggtgcccgtcagcccttggggggctgcagcaggcacttggctgcccccgaaacggaggtcaccttccatccacccagactcgccatcctgctcaggtcccaggagggacgagtttggtcccaggaggctgcaggaagccctcggcctcagatcctggcatgggagggtgcagtgtggcaagatgcctcccctggctctggggtggttaccaagtccattcttttctgtcttcctccacaggtaccagatccccaggggctgcagggctcaccagcagagattcctctgtcctggatggcacagacagtcagacagggaatgatgaagaggctttcgacttttttgaggagcaagaccaagtggcagaagagggtccgcccgtccagagcctgaagggcgaggatgctgaggaatccttggaggaggaggaggcgctggaccctctgggcattatgcggttggtctcctgttgttgagagggcccctttggtgtattccaggctttctggagatgacgtcccccttccctggaatctgagaaaagccctgagcatcccaggtcgccccctcgcagggatctgggccacgaggccttggcctggtgtgttgggggaagtagctctctgcgtgcccttggtggtgtgcatgtctctgggactgggcttaggtgtcgcctcccttctcgggtcacaggatgtcctccacttgtggctccgcactggggcttggtagagtcctccgtgacagctcagtagtgcaggctgcgggcctgtccggctagtgtgggaggactgggtgctccttccagctgtgggactcgcagaggtggctgcggctctctgggctgcatcatctgcatagcaggagcattcaccttggccctgcctccacacagggccattcaccagccatacatctctggccatttacaatctcttttcttcggttttcctcagtgaaaatggactcatggtcgtatcaacctcttagggctcctgtgacgatgaactgagttatgtaaatttagcaatcagctaccatcatggccccatctttcagtggaatcagaccaggccaggggtgctgtcctccccgctctctaccacaacgaatgtctcttagccgtttaccaaagccctcgggcgccagatgagtgtaggtcctgccgcagaaaggaattagagcccagtagaaattaggcagaagcaagttcaacttcatcagcatgtagaattctctcctaaaatcacagcccactctggaaaggccttcttcgtggggagggttatgggagggtgggctgcagggtggccatgagaccagcgtccaggggtgaggatttgcactgggaaagggtacgcggcgctcagggagctgcagcagaaacaggcctgagatctggggtcctgcggcacctgggcacagcaagtgccctgcagtcgctcctcctggccctccgtggctggccttgtccctgagtggggtcagcggccctgagggagaggcagccagagtagtgggtgatgtggggacaagcctgtaatagtcactccttatcagcctggcccaacgcggcaggcctttcttgggctttattttggtaagggtgaggctttgtttgaactcacattctctgttgttctgagtaaccacacgtagtgccaaaccgagatggactttggtggtctgtgccaacctttggctgaagaacacacttagcagagcggctccttttttgggtaggaaaatgttctttgtggctggcaagtgctgccttgaacttcctacttacttcattagcagattgtcaggggagatgtgtcagctatcctgggaccccttggcggggcggggggggggggccagccccctccccagctctgtactctggggccctcacccctgaatcctgggaaagcttagcacctaagagtaatcctgccggcttaagaccctcccctgctggggtttctttttaaggacccgtgtgacaaggtgctgatgaatcaacgttatcacctctgtcaggaataataagtaaattttttgagagtttatgaaatgctgggaactaagttagcatttgcttgcatgatctcattatatctgtaagacagcatttctgaaactacttgctacaacccatagtaaaaactatatggtacgccatgacccaggacacacatgtataaacatcccataaaactgaagcaaaagttcccagaactcatacaaaaccttactaagtgtattgtactgggatattttctattctatttcaacgtttggaaaggtcatgactcgccaaactgctttcaggatccactgtgggcacaggtcaagaaacggagccctggaggcctgcactggcatcagcctcttctgtgtggtgggaaactcaagttcagggtcaggtggttcgtccacgttcctgcagcctgcagatggcagagccaggaccccacgccatctccagtccagtctttatcagcctgggaggtgggcagggccccaggattatccccctttcacagatggtaaaatcgaggaaggagttgagcaggatcttggccagagccgtgtgtgttccagagctgtgtgtgtggcagagccgtaccttgaagttgggtttccacctcggcctttcacagacacccaggtgggcttgttgatctctcttggtgccacccacctgccctttggtgggggactttctgttcttctcgggaggctgtttgtgcacccctctccctcccgtgcgcttggttcctgtgcagatgcagcggcacccgtttcccagcttgccctgccccatgtctgggcttagctctgggctctcctggagcggccaccatttccatgcaaccagcctcggtccttccccgccgtggccgcggcgaggcgctgctgctctgctgaagggctgctccacggcagggctgctgggagggtgggagtcgccagcacaaagccggagcccaggccggcctggcttttctttgtcttttaaacctggttttgattagggacaagagagcgttattacaccattagagagcaattaaagatagaaaaagccctcacctcggcccatcccaacaccaccgctctctccatctgctggggctctcttctgaccccgtcccagcagcatccatgcaaccgcaggcacaatgcacgtgccttttcgtactctgcttttccaccctatggtctgtcccgattgctgctccatgtcgcccctgttttgtatttaagtttctattttagaatgtcacggtgctgagaaaattgacattctaccctaatagttctgccttatgctggaaatcctctgcgggaaacctttttcattgtgactcaaataacacacaattagtatagaaaaattgcaaacacagataaaagtcctttccctgtgaatttctgaatgcacctttgaatattcacatcttactgccaaaatgagattgtcttgtgtgccgttctggaatttgcttttttccagcttacatgttctaggtccttccagatcaatagctgcactctccctccttcctctgctggtttctcagctcgatgggctgtaagtggcattaccaggcccttgcttgtgggcgtggcggggttttctgtaggtttttgctattacaggcaataacctgaggaacttctacatatacaaagcttttattctatggagccttcccctatatacgtgccccagagcaaggtccctgaagctgcttctgggggctttggggtaccattccagtaaaaggttctctaagggctgaagcccctctgttgggaggcccctctgcttttctaagccctgcccacccccgccctcagggcccactcctcccacctcttcttttgcacacagggaccccctccaggccctgggtccctgaggactcacagcgtccttgggacaggctggctcctgtatgaacaaatgcacctgcctgcaaagctggtcttcccagactccctggaagggggagcccacacccgggtccccgtgctgtggcctccgtggtgaagctggatgtttctctggaatgccacgttttatggttgttttttaatatggattttgcttcatctttcataaaacaaccacatgtattttagtataaaaataatatcttactctatatttggatgaaatcacttctctggaatgattctgtggttttgaatgctcctggcacattgccaggtgctcccagatttgctaacccaagatttagcagcaagacagtcccttaaggtgagccgtggaggggagctctgtggggacagcagggcctcagtcccacctcctgaggtgccctggagctgcttccccgagggtgcctcttgctaaatatcccgaccactgcgcatgggcctggcacctctttgttcattccagcctgagcctgggcacccagggctcccctgatgccaccagtgcagcagagaccacctagggattctgggccactgaaagcttggcagagatagagattccaggcccccctcagatctgggtagggcccccagaatctgtgttttaacaagctcttgagttggttcttccgcaagctcctgtttgagaattcccagaaaccaaattctgttaaagtgttggaaatgccagaaaggaaacaggtgtggagagtggcaggtcagccgtcaccacagtctgccgcccacagggggctgaggacagggcgtgtccagaaggcacttccggtactgtctgctccccagcaactcctgctcgggctgggctttccctcgtctgctgacccacctgctggacgagttctctgctgtgccatcctggggttcatgtgggggccacgagccaggatggctgggcccgacctcaccctgcacctgtgcagcacttagccctggcctggctggggacccaaagccataaggaaaggaggaggcaggtgccacagctgccctgcagcgtcacgcaggcggcactccacccaggctgtcacagtgatcacagcagcacagtgtgcatgccaactgcatttccccatccagattactgccgtggccggacgcagcagctcacgcctgtaatcccagcactctgggcagctgaggtgggcaggttacttgagatcaggagttcaagaccagcctggccaacatggtgaaaccctgtctctactaaaaatacaaaaattagctgggtatgatggggcacgcctgtaatcccagctactcaggaggctgaggcaggagaatcgcttgaacctgggaggcggaggttgcagtgagctgagattgtgccactgcactccagcctgggcaactgagactctatctcaaaaacaaaacaaaacagaaaccaaacaaacaaaaaaacagattactgcacaaagtcctgcctgaatgaatgggctgttaggaacaacagatgtaccagtggtttctgctttttaaattcagtagcaaaacctttggctcaagagaaatatcatccagaatcccagtacataaaacaggctgaagtaggatttcccctggttgggacaagtgaggactggatctttgtccctccagcctcagccccacttcctggggtagccctgggcagctttgcagaaggcgagggccccttagagtatggtttgacagtgagtggggcagctggaaacccccaggatgtgtggctacccccagagcagggttaaagatgggcagtcccaggttcaaatcccctttctgccactcagctggcggacgctgagtgcgttgctgtacttctccaagcctgtttctttctttgtagagtaggggtaaagtagaggcccagtggctgaaaggataaaatgagatggagcactacaggaaagttcctttgtaaaatgttatcactatttcagattcactttgctctaaagaggtctttgtgtatttaaccaacagttgaaatatgaatataaaaggcagcttttccacttcctatagttgttatgcaaatatcagtcactgtgatgtgcacactatgactttacctccctccaggagcgccggtacacctgtcacctgttacagcttcctagagcaggcgattctggaggtggggcagcccctggccctggaggaaggagcctgcttacctgaatccttagtgggattcagtggttgcttggttccttgagagatagaaatctgggaggtcacacttgccattttcccgcctcaggctcccccaggacccgttgtggcaagttctggcaagtaacaacactcttaggatgacagagcctttacgctctgaggactgcagatcagatccaggctctgttgttacgactgaggaaccttcccaggatcacacaggagggcatgagagcaagagctgggggtctcctgactgctggcccaggacttttccctttttccccaggccatgtccaacacttgtgccaggggactgacttctcagccctcacctgttcactctcggtttttgatgacatgggtgatgggcattccccactgcaaggacagctagctgtctgctggtcgtgtcaccatttggagtggatcaggggcataggagcgcccatgtgagaaccagcaatggttgtttactcagagcttactgcgaccagggaggtgtcggccaccatcacctgcatttggcaaagatgcaaagagaggcaggggagtgggacactttgaagcagatgaaagggaaggctcagatacacgctgattggaggttattggcatggggaatccagaagcagccaatgagaagtggggcatcctttgtcctctgtgagcaggaagtggggcatgtttggctttctctggatggtcctactaaactggaaatggggaaaaatttaggaaagctggcagttattgatcaaatcttggccatttggggctgactgctgcagaggctgtggtctggcttcctgggcaggttactgcagactgtgggtcagagttccacctttacatgtggcctggccattgtccctttgtgtattcaggctcttgggggtactgggcgcttgctgtagaatgtaggctgcagagacctgcagctgggacccacgtggttccctggtggtgcaggagccaggatgggtgaggggcagtctctggccccattgtggagaaggaaaaatggcatcacccacaagctcaggtgggattgtcactgagtcctggcccctcaagatagggctcagtggccaggagagtgggctctggctgttgagaaacaggtccttggaatgtgactctggggaccatagcaaatgataaacgttcatggtgacctccctggctggccccattttttttttttttttttttttgagacaggttcttactcttttacctaggctggagtatagtggtgtgtgatctcagctaactacagcttcaacctcccagacttaactgatcctcccacctcagcctctcaaatagctggaactacaggcatgcactaccatgcctggctacttttgtctactttttatagagatgaggtttcactatgttgcccagggtggtcttgaactcctggactcaagtgatcctcctgcctcggcttcccaaagtgctgggattacaggcatgagccactgtgcctggcctggccccatttgctttttaaggcccagagtgaagtctgctgagaagaaagcataagtgagcctagacatcaccaggcagctcccaggaccccagacctctgccacggccctgcgctgacttgcatccaggacccacttggcagcttgcgaagcatttctgtgtcatttgcctccttcttccctttgacctccagtaaggaaacatggttggggaagttgagtgactggtccagatcctatacaagttctcctacatccccctctgctgctcctctctcagcaaaggccagaatctccccaggccccactggaggtggccaacaattcccacagaccctccctccatgcacctgctgcccagctattgggcactttcactatgccaggctctgcacaccttggcattttcatgggctcttctctctgcccggagcacagcttttgtgactctgctcgtttttccatcctggccttctctgaagcccctgtccagtgaggctggcttggactcccagggttagtgcctgtcctcaggtgattctcactcttgtgattgcttctccaaggaagcccattgctgttgcaaataacattgtcctggtgtgaatttcagaagtccatttattggtactctgagaattttctcattgaaaaaataaaaccagccaggcacagtggctcttgcctataatcccaggactttgagaggtcaaggcgggaagaccacttgagcccaggagcttgagatcagcctgggcaacatagcgagactccatctcgacaaaaaaattattttttaattagccacgtgttatggtgtgtgcctgtgtcccaattactagggtggctgaggtgagaggatcacttgagcccaggaggtcgaggctgcagtgagctgtgatcatgccactgcaccccagcctaggtgacagagaccctgtctcaaaaaaacaaacaaaaacccaaaaaacaaaaagacaccaaacagctgaatttaagaataaagtatgaaaagtgcattagtttaaagcacgcagtttgcatcattggcaaggaggtggatttccgtatttggttaagctgcaccctggctttgaagactcatgctgtccatgtgtctcagttgtggaaagatcagcagtcttctgttcagacccagttaagctggctgtgtctaggagatgcctctgccatgcatgtacacccggtgctgagcagctggtgcccattggtggtctgctgtgtgggtgggcacatctgggaatggtgccacaggccccctgggtggccagagtggtggatgctcttatgtgtcaatcactgtcaccagaactgcctgagccacagggagccaggctgctgctcagcctgtctgagcattggagctgtcagccgcggcagctgccgcctctcaccccgtatgctgcacgcccgcctgcagaacatggcctggtctgcgcgtctgtctgccgtcaggaatacacagcaggaaagcgggtgtctgtccatgcacacatgtgcatgcaacaagaacatgccagcacatgcctgcaatccatccaggagcaccccacctacctcatgcaacctctgtgggcccaactcatgttttggtggccctcatggcctgcactagttccaatgaaccctgtgctcaccaggaagccaggagctgcagttccagtcctattccctgcagacctctctttgaagccccttttgccccatccctggtgacaagattctaatcatgaccagctgtccttccaatgaagggagaagagggcacccttcctccatgtcagtgaggggctttgtctcctgtcagtgcagagggcgggctggagggcgggcactgcagagccaggccctgcgcctgcagacagctgggtggatgctgatataggaatggaggaggaggaggaccagggaggagaggattgagggggcccccgagtgatagcccatgtgtgcgacctgacccgactccatgttcatgacaaccctgaggtgtttgtgctaggagaagggtgaagaaatggctcagagactgagtgacgcacctctcatggaattactgaccccctcactgagatcagaaacctgtcatcaccttagacaattcccttctgtcagccgatcaccttaactgtccagatgtataagcacgtttgccttctgaagttccccctagcctgtcttcccctcgcaccaccgctgctctcctagtccaggctctggtcgtttcttctatggaccatgagcaaagcttccctggaaagaactgactctcagcctgttccctcatggcactacgtctgctgcaaacctaaggggtcccctttcaccaagaggaatctgggttcccagttatgtcctagtcacgccccctgcagaccctcacagtgtgactctcaggtcctgtacccaagatgctatttaactccattccaccaagttcacttcctgtctccacatcacctcctccaagaagtcctccctgagccctcaggcttggttggctctgtcctctgtgctctgccgtgacagagcggaacaccctgtgtgctaatgaacagtttcctttttttttttttgagacaaagtctcactttgtcacccaggctggagtgcagtggtgtgatgtgagctcactgcaacctacatccctggggttcaagcgattcttatgcctcagcctcccgagtagctgggattacaggcatgcaccaccatgctacgctaatttttgtatttttagtagagatgggatttcatcatctttgccaggctggtctcaaactcctggcctcccgtaaactttttgctttaaactaaagcacttttcatattttattcttaaattcacccacctcagcctccgaaagtgctgggattacaggcataagccacctcactcggccataatgatcagtttctatgtgaccctgctctgccatgagcttctggggacagcggcggctcgtcctcatctttgttccctcgtccccagcacaggttcttgcaggtgggaggttctcagtgagtgctcgccatcaaaggtgcccacgagggaaggaatgagttgctcatagagtggctgagggcctggtggcaagcccagtggagtcggccaggagatcttcggaggaggggctttcgcacatagggcgctgtctgagactggggttgggagcctatccctcttccctccctgcccctcccgccttggggattaacagaatcctgagatggagatgtgctggcaccctgctccctgcctacctgtcctccacctgtccatccctcctcccctccatccatcgcgcatcctctcatccagagtttatcaaggcatctgttatggaccaggcacattactaagcccccagaggctgaaagttttgggccgctcaggataggaccctggggcttttaggcaccaaaactccatatttcctgcttcttccttgattcccctgaagatgggtctagagagttggggaggtagagaaggcagcccaggcagcatgggtgggtgggggtagggtacagaccatgcctgctggagccgcccgcgtgtgctgtagatccactttatttcagttcaggacaacaaaagggcaaacatgtctctagggagaaaaacaaggacatgatccagttggaggagaaaactcacatggaaggaaagttaggcctcttgtgtgctgtccagaccaggtgcaggcgtaggaaggggcaccacggcttctccagagagacctcctcgcgcctgttctctctcgcttcccttgttcctcagatggctcgcttccctctctgcgccctctgatttctggtcaatgcaaagcctcttgctcccctgccccgaggggcccgtggctggttacatgcaagttcaatccccaggagccagggagggcctgcttgtttctgagcagacagtgtggggtgtggcatggagctgctgctgggggaggctgcagagcagcctcagacctgccctccctgagagctgccacctgggtaggggccggggtggctctccacccttccccaccgcagtgcctgctggggccaggagcaagggccacgcaaagggcggcagagatggggaatgaaggggagagaagcatcgggcagaacagtggctgcgagcctggctgaccgtggaattccacaggagactgaacacagcctcctgggcctgcttggggtttccgactcagtgggtcttggctggggtcagctttgctgtctgccccaggaggccatggcccttgtttggtacccacttcctaggagtcatgagagccgagctggctctgcctgattggtaagaataaaggggagaatgtctgagtaagagcaggcgagccctggctcctccaggtctcagaggagcagaagctgaagatttctggaaagcacttgcccttagggtggagaatcgaggctccctccacctcacctccagcaccacaagcagggcctgagggtggtgcacagcagaggaggtccctcatggcctgagctgggtggagaaagcacaggaccaggcagatgggccttcttggagcagtccctgccactgcgtctctgctccccatcactacccttgaaacatgccactttctccccagagaacagcaggatcaatcctgttatccctgcgccatcctatatcaccttcctcatgggacatttggaggggacaagaggataggaccatgagtatgaccatcctcaatctagacccagcctgcctgtcccttccctgctgtgtggccttgggcagacactcagcttctctggaccactgtttcctcatccaacaaacgagccctgcagagatccttcccctgggactgggctctgagctcagaggatgctctgtcctgcagccttccagcagggaaccttccagcagggagccttcctggctttcatagtttctcctcgcctcggctgggtgcctgggattctgccagacctcagactccagactgtgggaatggtcaccttgcggggacctgcccctccagcacccagggccattctgctatttttatctgccattggttaatctgtatcattgtgtaggccagcctctcggtgcagttttgccgcagcgtgttaccaacatgagctcagatggtgacctcacatagtgacctcagtccagtggaactgcccgccaggcggacaggcacacggaatttcagtttccagtaaagagcatattctcattattttcaggaaccttaaaatggctaatagacatcatcagcagggattgaatgcctgttaaagtaattattaaagtaaaatcaagtgtgtttacttactggcggtatcacttacagtgacgtacacagatcctgagcattcagctccatgcgtgtttacttatccagcccgtaactaccgcctggatcaaaactaaagtactcctacaccccagaagcttccatcctgccccgtcctggtttcttacagcagggtctggcccagagcaggacctcctcagccagtcggcaagtgcactgtaatgggacctggggtggcagagtcggagccggggaggtgggcaagtcccagagaggcttcctgaaagaggggggctgctccacagaacccaagtgttaactagaacaatggtggttttaccatgcaaaggaaacaataaggcacttaccaaagctgctttctgccctcctgagtcctagccctgaggtttgtggctcaagaccaggtccatccccatttctgagtggctgtggagtgtggttctctgagcctggcccccaagtgctgagaccctgagaccaggcagctgtctctaccttccgaatgggagtgtgatctctggcctgtgaccgcatggcagactcaaggcctgaaggcgtctaagagctggggttgtctggcagctggtgcccggtcctggcagccgcctgctcctcctgacagtggtcatttcttgaacacagggcacagctgcccacagtagcgggggccttaccactctgtcattggggaaacctgcttctcaaccaccttcgctggcctgcttttctcccctgggatggaggacctgtccttcccttggccgtgtgaccatctgttagagatttcagaaagacttcagctccacctgcctggactgctctgggtggccccctccaggacttccctggtccctctggcctggtcttttctggcccatggcatccagcccctccactgcagggcccagcgcctgtgtcggtctgaccggaccacctggacacttgtgggaaatcctcaccttgtgctttgtctgtgattctccagctccaagaagcccaagaaacatcccaaagtggccgtgaaagccaagccctcgccccggctcaccatctttgacgaggaggtggaccctgatgaggggctctttggcccgggcaggaagctgtctccacaggacccctcggaggacgtgtcatccgtggaccgtaagtagagccccatggtctgctcctggtgtcctctcggtgcccagccccatcaccaggcagggtctggactcacccggcgtgaataggacccatatatctcccctgtcctgtttagatgtgatatagactcagctttgtgcttccatgacatctgtgggcagatgtgggccctgggcttccaggcactgtttgtgtggtaagcgatagggcctgcctagggcacatgtgtgactgtaggtttggatttaatgggactctgtgtcgcctgcatggactctgctggagggctctgtgcagagttggcagagggaaaaccgagcggccttgggacatctccactcatcccttggtccctttcctcacatgcccaggtcgtcctccggtgaggggaattgatgccacccactaattcagcccatacttggtgagccctcactgagggccaggcccaagaacatgctgaggagtgagacctagtccctgtccctagtccctatcccgagggccccgggggcccctggggagacaggtcattgcctgacagttacaaagcagcaccagttatgacaggttgagcagaggcatcaattcctgtaggactgcccagaagacttcctggggtggggcagagagagagcggccatggcatcccagcctagaggcttcctctgacccccctgctgctgccttcccacagccctgaagctatttgatgatcctgacctcggcggggccatccccctgggtgactccctcctgctgccggccgcctgtgagagtggagggcccacacccagcctcagccacagggacgcctccaaggaactgttcaggtaccacctgtccccagcggcgcttggccagctctgagagtgtcctggacagagccaagggcccggctcattgcccagtctcagccccagcctcctctgaggggaggaccccaggcctgtgaaaagtagaagcctgtgggtgcacattgggtgagaggcggtgaagggggctgagggggaggatccgcagcccagggctgctcagctagttccagaaagagagaactttgtgtgcacaaccagtctttcttttcacaatcatattttaacagtttatgtaaagaataattaaattatataattgcaagagcaggtataactggcataagcaagtttgggaacaaattaaacggactcatggcagcatgcagcccacccagcgagggggcaaagtgcagatgtcctggtgatggcctctctgccggagggcccggtcggcagctttcacagaaggaagggagaatgaggcctcagctgtcacatggaggtcaattggcagaacctgtgccggtgacagctcctatttcctgagtccttgctgtgtacgcagtaagccagactccttacacgctctcttatgtaatcttcacgacagccccctaaggtggatgctattttctccatattataagaaatcaagtgtgggacgccacctggctaagacccctgctctgcccctggcctggcctctccacttcatcagggactgtctgagcacttggctgggtgatctgcctccccacccagccccccagttctccccaggcctttacctccactggccacattctcagcagactcagtgttgtgcgtgtctccagctcccactccatgctccaggacacaggactgtgcctgggattcagaggaagccaggccgcctctttccaggaacggcttatgtgacaccaaggcatgcaggccctggaggctgtcatctgtacccctcattagcagcctcgggctattagacagccctgcaagtgcccgccaagcctgagtcaccgtgacggcttctggtatttacatgtccccaaggcccctggcatctgttcactctcatcctgtgtcctcgctcctgacatcccagcgggctggaagaaaccaggattgttattttattagagggaaaccgaggcacagggaaatgaaatactagagtctgcctgcggagcagcagggccaggccgagcatgtctaggagtccatgtgtcccagtggggtggctctcgtgggacctttctggcctagtttattctaaatccgttacttcccaacctgtgttctgcagaacgtggtacagtggggtggtcaaaggctatcttcaaaggggctctgtggctgatgaattggggaaatgccacaaaaagcagggctcgtagtgcgcgggccagcaccacatggcacttcacgttctcattcatccctgggccccccgctctgtggtgccccttagcatcccgcagagcgcttggggagtccctgctcaaaaagtgtgggtcccgcacccccaccttcactttagcagacatctgctaatgaaaggattaactgcttttcttttttttaaattcagacaaattcaaaaagagccgtaacactgggattagcttcttgagagcaggaaccacattcattctttgtgtctgccctgtgactatccagggagtagttggacttcctcataataaagaatgttctgatagccattcattcattcatgctttcaccccttcgttcattctgtcactagcctcagccaccctgaggccgcgtggggtgtacactgagcgggtcgaggctaagaaggctttgttccttctggctgtgcagccacaccagggcagggcctctagtctagatgtttaggtgagtcttgtcttccgcaggaacccagggagaaggaatggggccagggtcttagagctcccttaccccccactggttgacctcacaccagctgggcctggaggagaaaagagctggaccttgcgctagtgagagctagtcctagtcatgactcagaaatagggtgcttggaaaaggggtgccttgcagcctcctgtgtcccaagagcagctatgctgcctcccaccgtggctgaccacccgtgtacaccacccacctgggagcaaatccagctgctgattagttccaaagagtcactgctttgccaagcaggctaatcctgaaatctgacataagcctctagcggctgctttattttccaaagggcccctatttgaggataattcagtccctttgagcttttcccaggtaccctcagccttcaatggaggccgcatcatgccagtggagctggcacctgccctgggggagtcaaggaagggctgccacttggagggagctccggaacatctgacctgaggtggccaggagcagactggccatgagtgacacctcctgaaatcacctctaccccaagacagctggtctgtctatgaaggcccggcttgggccagtccctctgggtttgttcaagaaggacaccttttattcatttctctgccatccaaacagactctgaattctctctctggggtttgtgccccatcacaggaggttgagccaggaagcaggcagggtgtccggagctccttccacagctggctccaggcaggcatccacccctgggggtgctgtgctggacacctccatactcacacaggctctctggtagtgccaggagttgtcctgatcagaggtatcgcctctctatccccacccctgcccggccctgccccagggcaagaagccgctgctcatgagcctgcctggttcttcctgttcattctcattcccacctccagacctctgctgtctgctcccttcttcagaattctctcccctattcatgccaggctcacccttctgaaaagacccaccttcccaggaggccttcccagcctgctctggcccaagggctcactcccttctctggacttcaacaccttctttccaggcctttgcaattatgtggcccctgtctgactgggctggggggtgtccctcattgtaggtggaggcactgcttttctgtgtcttatgcccacttgctcagcccctgtggctgtcagtagacatcagtacatacagccttcctgtacatttggaaactactttccttgtgttgtcttatttgatccttgtaagaatccctgtgaggatggtagagcaagtacaatcccactttatagaagagactgaggaccagggaggaggagtggcctgaggctgcctgatggaggagttgcagggtgaggaacggaagccagttctcctcctgcagtgctgtgcttctgtgtacagttccgtgcagcagtgccagtgacactgttactcctgcttgtagatgaggaagccgaagcttgtagagaccaagtgggtgctacaggtcttctgccttcactcacctgattccagcatggctgagcgatagacgtagagatgcccgttagcacaagggaaaacctcgccgtgacactggagtctaggtgccccagccaggggaacacaccccagagaaccagccacatgcaggccaagtcctgttcatcctcacactagctgtgggtctcagggcaaggccctttgcctctctgcacctcagtattctcagctgtaaaacggggctaatctctgcgaccacacagtgtttggagattattgaatgggttaatgaatgtggaaatgtctggccatcacgggtgttcagcacagagctgagtgggtggaatggattgaatgagtcttccactgtgcatctggtctccagaaatcaagttctggagaatcagtggcctggcctgtttcttgccctcagtacccagggatggtcctgagtgaccgtaacactgccagggctttttgcccacccaccagtgggagattagaggtctggggtcatgacagagtcttggtgggccctggccgaggccatcctcagctctcactgggttccgtctggcacccgtgtggcccacagcggggcactgtgggcgggccaagcctgtaccaccatggctcagcgcccctggttattctttctctggctgaacttgctttggatgagggctcagcttctaagggccgatgtcctgttccttccaacaaaggcactgtcacataccatcccctcgaggtcactcggcctcctgggactccagcgtcctcatctgcgtgatggaagcacagtcatgcctccccagagtggcgttttgaggataagatatgataacgtgtctgaagtgctgtacagagcgggaactctgtacatagtagctggtggttatttctgaagggattggagggaaagcccactacagaaggcagcgtgtgtcaagtggggtcacctgaagagcaactctcaggaggctgcgtggggcctgccctgtgcctgctttgctgtgggtgggagggaaggagagccctggccttcgtgtctcctctgggcaggatgggtggaggggccagagtggaatggggcagagcagggcggggccttgacctggccgaggctgggctccctgccgctgcccagccccgtgtgggcactggcattgcctggggtcttgttcctgtcacggggtggcagtgttatgctcagggttcctccctgtggttccctagagttgaagaggacttggaccagattctgaacctgggagctgagcccaaacccaagccccagcttaagcccaagccaccagtggcagctaagccggtgatacccagaaaaccagctgttccccccaaagcgggcccggctgaagctgtggctgggcagcagaagccgcaggagcagatccaagccatggacgagatggacatcttgcagtacatccaggaccacgatacaccagcccaggccgcccccagcctcttctgacccttccatgctggcccctggcccagcaggcctgtctgtggggacatcggtgtgaagggaagggactgggccctgcagggtcagaacctccccacccccaggggaggccaggcagaagcctgggtcacagcacccagaactgcatggttccattttctccggggctgtggggccaaagtagaagcctgcgggctgcgggagcggctctcaccctaggagccagagcccaatgtgtcttattccccgtggacatgaaggggagggagggtgtggggatgccttgccaaccagatgcccagccccaaggatgaagcaagacatgtggggccgtagcgaggtgtcacatggggcagggaagcttcatgcccacgggttctgccagccccagcacagacccaaactggggctgggcctctatccctcctctgcctctgttcgcatagtaagaaggagtgaccgggatcctccccttcccctaccctaagctgtagcctgggtgactgactggcctgggcctggggtggggacgtccccaagccaaattactccagggtctctgctcctcgtggctgccaggggcctgcagggtctgggtgggtctcccaggagaggaatactgagtgggagatcggctgtctggagtgttctgatgcaagtctctctctcctgagcctcctcttgatgcaagctctaaagggagaagtcaggccctgcctctccagggtatagacggccctgctaggccccagttcttcctccttccccctttcccaggaaaggccagcccagtccatggccttcttgggcctctgggcacagagccaatgttcgtcattgcagctctcagcaaactgggtcatagctttccccacagctcagcctggggcctgggcagggctcccagcctgcaccgcctcccactgccagtggggcatgattctctcaggcttctgccccgaggccttcgtcgtcctcagggtctggacttggtcagtggcctttcaccagtggagctgccttcccagggagaaggagccgtgcgccagggcagggcccgtgccttagacttctcccgacccccagagcgctggtacacaggtctaggcaccacacagtgctttggaaattctcagtgaatgatgtttaataaagcaaaaaatgtcaaggtgtctttcttggatataattcttcatgttcagagctagttttttgttttgttttgttttgttttttaatgaaacagtagttttaaaggaaatgcaaccactattgctccttggccctgtcctgcctggcagaagcattgagcgggtgggactaggacctcagacccttttctgatagacaccaaagccagccctgagggagcccccggctgatggtgcgggtggtttgcagccatcagtgttgagtgtctcagctcctggcccgtgccaggacctgtctgctctgtcctgcatctgatcacgtccctctccagctgtggcgccctgtcctgagcagcttcccctccaccagtgctagagtgagaggaaacaggtggttttggggtcgagagctgactccctcctcctccgtcttaacccaggctcagagggtcagctccctccccagggctctgagccagctctgggacagctccagcaccggctccacccatttgccttcccccttcacacccgcccctccttcccagcactcagccccgggccctgcatcccttgctgactgcagcggaaggtctcagtaggagtggggaggggatggggccaggtcttcctccgagaggtggctccagctctcctctgggctttgtcccctccctgccctttctgcaccctgatgctggctccctgcctcctgctccccacctgctttgggtcaagtgacataggagcagagggcacagcggggtaggtggccacaggggctggtgctctgcttggggtcactggcagaacctggcctgcccgttgtgtattcatccactgtggacgccacctcctcagtggtctggactctctggacaccatcacaaagacccccagatattgatgctccaatatctgtggcttgttcttcacccacaggactgcgactcatggccaatcaatgatccttgtcgcctgataaagcctgtgcctgtgacccattccagcctgtgttagtgatgttcttttctgtgcctaggctgatggcagaccaccagggaggggagagggggagaggattgtcctttaaaacaatggactcagccagggaagctgccctgccccagtcacccaggctgctgcttagggtaggggaaggggaggattctggtcactcctcactatgccaaccaaggcagaggaggcatagagtcccaggcccagtgtggtcatcgggccagtaactgcacagccaagacccatgtagaaagaaagaggacccctttctgtctccagacctaccccctattctcccacagtggagatggtctaggcttggactggccctggggccctttcaggtctgacatcagatggccctgcgcctctgtcagcaaacccgccctggccttcagggctcaggttcttagatgcagcttcagccctgggacccagggatgctgaagtagagagttctgtcaactgaaatccactagagaactagaaacaggttctcagggagcctgagaggcctcctgcagggacagaatgtggcctctatcccccccaagattttggttggagtcttgtagctaagattgagctggagtcctggctcctgaggacaggcactttggccattctgagaaggtctgctcaggccaggagcctgcagctgagagttccctgtggaagggaaacagaagtttaactggggacaacaacacttgtttatttcgaagcctgttgtgagcccatggacaggatgtactgtctatggctggggtcccactgctcccttcctcccggcattgttcctcttaggaagccgggaactcaggccagttctggaaagtccctagggccttccctggccaggcctgtgtcatgggcccccctggagagcacctacctgttgagtactggtgtcccatgaccacgtccatacaatgtatctgggactaagttcacctccatgtgccccacgggctcctctgagtctcaagctctcacacaaggtacagacgagacagcaaagtccagccactctctggggccctgtggccttattgtccagcggccacctgggcgttgtgttgacatacttggtgcagtgatttaatacccggtgtcaggctgatgtggagggtcattcccatttctctagctcaccagctgcctagctgagccaatcctgggaaacagagagggtaacagagctaccagcatgtccccacatagtggtcctgcctgctgctattggcttcatgtgggttcacagctgcccagagcaaacatagtcaatgctcagagcctcctcaaggagctgaagtctcagcatcaagctatgaatggtcccactcactacaaactctgatcgctccaaaccattccctgctcagcaccctaaggccttgcagttggggaagctgactgaggggccggtggggaagcagatccaggggccggtggaggagcagtagggactggcccttgagttctcatgcagcccacagcatcctgtgaagcagcagccaggttctgtgggcacaaacggccagggttccagtccagcttggctgtgtgatatcccctcaccccacagtgccaagtgaagagacttacccaccctgggtcctgggaggaagccaggtagactataaagtcctctacgtgcctgaaggaatttcagtggactggtcatgctagatcctcacagagggacttccctgcccggtaccagctagctcctaacaggaggtggcaggccactgggcaagtgatcaacaggcctgtcaacagctcagtcaagtccccagccccagtgctgaccactgacttctatgccaggcctggcgctgcgacacacagaatcccacgcggtacacagatatccaccctcctctgtggctggcctctcactcctgtgctccgtggctctggctactgggaagagccaagcaatttcatgtgtcgggtcatgctcaggctaaagctacagcttctgaagtgggattatgggctcagcatgtggcctcggtaagccgactctttattgatgactttcagaggcctgatgcttctctgccaactcagcacatagcagccgcctctgaatggctttttaaataaagctgggctagctctctccaggccaactggccaatcatgtcgtttgttttcccacatgcagagctcatccataaacactaagcacgtaatgggcacctaccgtgtgcagtacctgttccaggcaagttggaggaagcaaagatgaaaaaacttgagccattaaagccaattctaccaggagccatgctgagcctctagtttcacttctgttctctgggccttctgcctgaacctcaggcacaactaaaggaggtgcctcctccatgcggccctctctgcctgtccttccccctctgccacctgccagcatggacagtttgttacctgcagcctgggctcagcttttgttccatttcctggagctgccttggcaaagcaccataaactgggtggctttaaaccacaggaatgtattatctcacagttctgggggtcacgagtctaaaatcaaggtgttagtagggccatggtccctctgaaatctctagggaaggatcctactttgttttgtcctggcttctgggggtttcctggcaacacttggggtcccttggtttatagctgtatcaccccagcctctgcctttgtcttcatatgagtttctctcctctgtgtctgtgtcttcacacggtgtcttctctgtgtctgtgcccaaatttccctcttataggaaagaataccagtcattggattacggcccactgtaatctgatatgacctcatttccctttaattatacctgcaaaggccctatttccaaataggagcaccttcacagcgtccttgtggacatgaatttgaagggatgcaattcgacccagtacagttaccacctgtcctgagcacgtggcattcagcagcaagcagaggcccattccattctgcaaggcatgccccctgtgccatccctgtgtactctgtgtgtttcagcagtgccatgtcggtttcactcccatgtgaggggacgtgtcaggaggaagctgggcaggcagttgtgtgtgtagacacccaccacgggccatcattataaagttctgtcctttgcagctgctgccagacatgtcaaattctctctatcaaaagctggatctctttattaaatagtgaaatgactccttagataacatgtggcacaaactggagagctggtgacactcagagctatcctggctggcaggcgggcagcggcgttccttccttccttcctccagcagtgcccctctggagaaggccttccctggctggaccagcactgtctgttcagagccataggcagctgagtcctggggctcccccttgccatcaccccattatcctctcgctggcctccgaggtagtcggaaagggctctgaggatgctggcagtgggaactaaaggcttccggagcatgggagctgcaggccaactgcctttactgctgccttctcaagctggttttcttcctttgctgagatcgcccttgacgtctccacagtgtgtttctgtttttccttttggtgttatcgccactttgctgattttcccctaacaagtgctctaggtcccagagggcaatgtttttctggattagaaagtagaacagctgatttcttgcccacctgtttctcagacatcagaagctgcagagaggctgagcttgactcagtcccccccatccccagatggcttcattttacacctaggctggttccaggaccctaaattgggctctgtctgcttgtatgggtggccctaggatttgcatcgggacctcacagtctataaaatccatggctgtggaatggaaaatggtgcagcactttgggaaatagatttagcagtttttacaacaagtaaacataaatgtaccacacaaatcagcaattccactcctaggcatatacctaaagagaaagagaaatatatgtccagtcaaaggcttgtacacagatgttcatagcagctttatttatcacagccaaaaagtggaaacaatggaaaagcctctcggctggtgaatggataaactaaatgcagtaaatccatataatggaatattattagatcacaaaaacgaatggagtgatacatgctgcaatatggatctacctcaaatacatcatgttaagtgacagaagctagactcaaaagaccacgtattgtatgattctatgtataggaaatttccaggacaaatctacagagacagaaagattaatggttgcttcaagcagaggttggaactaacagtgactgcaaaagggcacaaagaatctttcccagggtgatagaaatgctctaaagttggcttgttgtgatggttgcacaatttgataagtttactaaaattgttcaattgtacacttaaaatgggtgatgtttacggtatataaattatatctcaataaaactgttaggataatttaatgattggaaaaagaaggaaaccaacaaatccataggcagcagagtgcagagattaaaaatgtgagccaactcctggcttttgggcttcctggctgtgtgaccctgggccagttacttaacctctctgtgccccaatttcctcctctataaaatgggggtaataattttacctgcctcattagggtagtataaggctaaatgagttaatatttgtaaagttatttgaacaatacctgatgcatagtattcattatatgtgtgtaattaacattctgttgaaattctgttaagctgctgtctattgggctatgaggaatcctagagtttgagtactccctctcttcatctgagagtgaacaccagacatcttcgtggaaaggggtgctgatggcttgctctccatggagggtggttgtaggtgcgggaggaggctgtgccaccctctgccatctctcagcttctctgaaccccacgctgctgagcagggtgatggcctgcttctgctgcctcaccgtggggtggggggcatgggaatgggcacatacaaaaccactggagacccagaaaggggccctgggattgagggaccctgtgtccagggggccctggtatgtgactggggactggatccaggtgggtcatggaggtctaccaaagggagggtagatggaacgaactggaaatgagccattctgacaaggaataatgtcaacaggactgcggcagcggggagtacattccagctcaccccacactcagagcaacaacagctctcccagcaccatggagacaggaagtaaacacatcggtttccctctcctggtccctgaactttgcgcacgatgtggtcaagtggagagaggtttctggcagtcccagcggcccatggtcaggctggcctgtatccctttctctttaccccttgggatttcccagcttccttatcaaccctcaatcactttgggagggagtgagccagcgttcccccttccttcgaaaagaagccacacacacaaagacttagacacgaatgttcacagcaacattattcataagggttcctcccccaaaggaaacaacccaaatatccatcaaacaaacggtcaatgaacaagcaaacagtggcacatggatgcagcggaatgctgtgcagcgtcaaaaaggaaaaaccctctaacagacataccacaatggatatcacaaacatgctaagtgaaagaagccagaccccaaaactatatcttgtatgatcccacatatatgaaaccctagaaaaggcaaaattgtagtgacagaaagcagacccatggttgccaggggctggggatgggcaggacaggagtggttggctgcaaggggccatgaggcagcttttgggagtgatggaagtgtgctacgctgtgagcatgactataaacgttcaccaaaactcatcaaactgtgcacttaaaatgggaacatttgattatacgcgaattatatctcaatatacctgtggaaaccacagtacaaaactgaacatactcttaccatactctccagcatttgtgctccttggtatttacccaaaggagttaaaacttatgtcctcacaaaaatctgtacatggatgcttatagcagcttgattcacaattaccaagacttgggagcaaccaagatgtcctttggtaggtgaatgagtaaacagactgcagtatatccaggtgatgattccactgagcatttaattcagtgctaaaaagaaatgtgctatcgagccatgaaaagatatggaggaaacttaaatgcatattactaagtgaaagaaggcaatctgaaaaggatatatatgttgtatgattccagctatctgacctggaaaaagcaaaaccacagagaccataaaaagatcagtggtttctggggttcaaggggaagagagggatgaataggaggagcacagaggatttttagggcaaaaacttatctgtatgatactctcatggtggatccgtggcattattcattagtttaaacctacagaatgcaccgcaccaagagtgaaccctaatgtatgctatggctctgggtgataaggaggtgtccatgtgtccatgtaggttcactggtaaatgtcccactctggtgcaggctgttgctggtgggcgaggctgtgcatgtgtgggggcaggaggcatgtggggactttgtactctctgttcaattgtgctgtgaacctaaaactgctctttaaaaaaaatctacttaaaaataaaaaaggaaccacagggaggaagctcatgaagtagaagatgcctgctgccccaagatacctggtatccccagaccatgccccacctttggtgatagcccccacagtccccagggtacctgggctccaagtgaggcttagcaaacgtttcactgatggtgggaggggtttccagtccagtaaatgggaaaaactgagtcaaggggctgggggcaccctctgagggaaaggacacctccagagtcctctggagcaatgaggggtcagaatcctcaattggcctggaagtcctggcaccaactggcctttgttccttgacagcatctctctcctcctctgtacgatttccagcttttctttttcttcctctagttaccctgtgttgtcctggacaggtgaatggggagaattaactgcatggtggctcagggcctactggcacagtatgggatgacacacagctgagcaaatccacagagcggctcagcccagccttccctcctctcccccactcctggaatgaagccaagaggagcctcagtattcggaaaactgttcaatgtgctccctagagaaggctccaagagcctgagctacaacaggcctcacgagaacaggccttttcctggaggagagctcagaggtccccccgggcccctggaacggctttgaagtggcaatcttactgaaggtctccaccaggacccctttggcttggggagtgcatggtcctttgctgggatgcaggaaggctgctgtgggttctcatgtggcagagagcgaggactagagccctgagaacctgacttctcacaggcactattagagcagcaggccaggatcctgatgcagcgcctggcggcctctgccccccaggacggtgctcatcctgcagctacccatgggtggagagccacagagcaggggcccttgaacacctgtgtttcttggatgggcatcagttctctctgggctcctgccaatcaggccaacaaggttttggggtttgttttccctgtagccaggcgggctcagacatagctcttctcagcaagcctgacctcttaggcttttcaggacctcagcatttatgaagtgtgcctcaggcctcttcatgctcagagctgtgggagagggccagggaggagagatgcatgactagttggagccacaggagtgaggcataggaactccgcaaaaaactcttggtttgaaagatagagcactgaatcagaaagtggagggcagaggtggggactagaggatgtgagtgtggcaaaggctggagaactggtttccttggggcagcagagtgagcaagggtgacagccggacaccctggagaaagtagaggatgagccaatgagagtcaagaaaacacttggtgaaagacagaaatctttgcccgaagatcaggaacaagacaggatgcccgtttctgctacttcttttttttttttttttttttttgagacggagtttcgctcttgttgcccgggctggggtgcaatggtgcaatcatggctcactgcaaactccacctcccgggttcaagagattctcctgcttcagtctcccaagtagctgggattacaggcatgcaccaccacagccagctaattttgtatttttagtagagacggggtttcaccatgttggtcaggctggtctcgaactcccaacctcaggtgatcctcccgcatcggcctcccaaagtgctgggattacaggcatgagccaccacacccggcctgtttctgctacttctatgcaatattgtactggaagttctagccagagaaactaggcaagaaaaaaaaaagacatctagatagtaaaataagcaggagaaccacatttatttgcagatgacatgatcttacatgtagctgatactaaagaatctacaaaaaaactattatagctaatatatgaatttgacaaagttgaaggatacaatattaacacaaaattagttatatttctatacacactacaaaaggaaaatcaagaaaacgattcaatttacaatagcaccaaacacaataaaataactagaaatgaatttaacaaagggaggggaagacttgaacattgaaaactatgtaacaccgctgaaagaaattaaataaaatttaagaaaataaaaagacattccatgttcattgattagaagacttgatattgttaaaatgacagtaatctccaaatagatctacagatttaatgccatgcttatc

SEQ ID NO: 3098 - DNA, 2398 bp, Homo sapiens
tgactgcgcgccccgcccggagtccccgccgccgtcatgcagtccccggcggtgctcgtcacctccaggcgacttcagaatgcccacactggcctcgacctgactgtgccccagcaccaggaggtacggggcaagatgatgtctggacacgtggagtaccagatcctggtggtgacccgtctggctgcgttcaagtcggccaagcacaggcccgaggatgtcgtccagttcttggtctccaaaaagtacagcgagattgaggagttttaccagaaactgagcagtcgttatgcagcagccagcctccccccactacccaggaaggtcctgtttgttggggagtctgacatccgggagaggagagccgtgttcaatgagatcctgcgctgtgtctccaaggatgccgagttggcaggcagcccagagctgctagagttcttaggtaccagatccccaggggctgcagggctcaccagcagagattcctctgtcctggatggcacagacagtcagacagggaatgatgaagaggctttcgacttttttgaggagcaagaccaagtggcagaagagggtccgcccgtccagagcctgaagggcgaggatgctgaggaatccttggaggaggaggaggcgctggaccctctgggcattatgcgctccaagaagcccaagaaacatcccaaagtggccgtgaaagccaagccctcgccccggctcaccatctttgacgaggaggtggaccctgatgaggggctctttggcccgggcaggaagctgtctccacaggacccctcggaggacgtgtcatccgtggaccccctgaagctatttgatgatcctgacctcggcggggccatccccctgggtgactccctcctgctgccggccgcctgtgagagtggagggcccacacccagcctcagccacagggacgcctccaaggaactgttcagagttgaagaggacttggaccagattctgaacctgggagctgagcccaaacccaagccccagcttaagcccaagccaccagtggcagctaagccggtgatacccagaaaaccagctgttccccccaaagcgggcccggctgaagctgtggctgggcagcagaagccgcaggagcagatccaagccatggacgagatggacatcttgcagtacatccaggaccacgatacaccagcccaggccgcccccagcctcttctgacccttccatgctggcccctggcccagcaggcctgtctgtggggacatcggtgtgaagggaagggactgggccctgcagggtcagaacctccccacccccaggggaggccaggcagaagcctgggtcacagcacccagaactgcatggttccattttctccggggctgtggggccaaagtagaagcctgcgggctgcgggagcggctctcaccctaggagccagagcccaatgtgtcttattccccgtggacatgaaggggagggagggtgtggggatgccttgccaaccagatgcccagccccaaggatgaagcaagacatgtggggccgtagcgaggtgtcacatggggcagggaagcttcatgcccacgggttctgccagccccagcacagacccaaactggggctgggcctctatccctcctctgcctctgttcgcatagtaagaaggagtgaccgggatcctccccttcccctaccctaagctgtagcctgggtgactgactggcctgggcctggggtggggacgtccccaagccaaattactccagggtctctgctcctcgtggctgccaggggcctgcagggtctgggtgggtctcccaggagaggaatactgagtgggagatcggctgtctggagtgttctgatgcaagtctctctctcctgagcctcctcttgatgcaagctctaaagggagaagtcaggccctgcctctccagggtatagacggccctgctaggccccagttcttcctccttccccctttcccaggaaaggccagcccagtccatggccttcttgggcctctgggcacagagccaatgttcgtcattgcagctctcagcaaactgggtcatagctttccccacagctcagcctggggcctgggcagggctcccagcctgcaccgcctcccactgccagtggggcatgattctctcaggcttctgccccgaggccttcgtcgtcctcagggtctggacttggtcagtggcctttcaccagtggagctgccttcccagggagaaggagccgtgcgccagggcagggcccgtgccttagacttctcccgacccccagagcgctggtacacaggtctaggcaccacacagtgctttggaaattctcagtgaatgatgtttaataaagcaaaaaatgtcaaggtgtctttcttggatat

SEQ ID NO: 3099 - protein, 392 aa, Homo sapiens
MQSPAVLVTSRRLQNAHTGLDLTVPQHQEVRGKMMSGHVEYQILVVTRLAAFKSAKHRPEDVVQFLVSKKYSEIEEFYQKLSSRYAAASLPPLPRKVLFVGESDIRERRAVFNEILRCVSKDAELAGSPELLEFLGTRSPGAAGLTSRDSSVLDGTDSQTGNDEEAFDFFEEQDQVAEEGPPVQSLKGEDAEESLEEEEALDPLGIMRSKKPKKHPKVAVKAKPSPRLTIFDEEVDPDEGLFGPGRKLSPQDPSEDVSSVDPLKLFDDPDLGGAIPLGDSLLLPAACESGGPTPSLSHRDASKELFRVEEDLDQILNLGAEPKPKPQLKPKPPVAAKPVIPRKPAVPPKAGPAEAVAGQQKPQEQIQAMDEMDILQYIQDHDTPAQAAPSLF

SEQ ID NO: 3100 - DNA, 1817 bp, Homo sapiens
tgactgcgcgccccgcccggagtccccgccgccgtcatgcagtccccggcggtgctcgtcacctccaggcgacttcagaatgcccacactggcctcgacctgactgtgccccagcaccaggaggtacggggcaagatgatgtctggacacgtggagtaccagatcctggtggtgacccgtctggctgcgttcaagtcggccaagcacaggcccgaggatgtcgtccagttcttggtctccaaaaagtacagcgagattgaggagttttaccagaaactgagcagtcgttatgcagcagccagcctccccccactacccaggaaggtcctgtttgttggggagtctgacatccgggagaggagagccgtgttcaatgagatcctgcgctgtgtctccaaggatgccgagttggcaggcagcccagagctgctagagttcttaggtaccagatccccaggggctgcagggctcaccagcagagattcctctgtcctggatggcacagacagtcagacagggaatgatgaagaggctttcgacttttttgaggagcaagaccaagtggcagaagagggtccgcccgtccagagcctgaagggcgaggatgctgaggaatccttggaggaggaggaggcgctggaccctctgggcattatgcgctccaagaagcccaagaaacatcggtgtgaagggaagggactgggccctgcagggtcagaacctccccacccccaggggaggccaggcagaagcctgggtcacagcacccagaactgcatggttccattttctccggggctgtggggccaaagtagaagcctgcgggctgcgggagcggctctcaccctaggagccagagcccaatgtgtcttattccccgtggacatgaaggggagggagggtgtggggatgccttgccaaccagatgcccagccccaaggatgaagcaagacatgtggggccgtagcgaggtgtcacatggggcagggaagcttcatgcccacgggttctgccagccccagcacagacccaaactggggctgggcctctatccctcctctgcctctgttcgcatagtaagaaggagtgaccgggatcctccccttcccctaccctaagctgtagcctgggtgactgactggcctgggcctggggtggggacgtccccaagccaaattactccagggtctctgctcctcgtggctgccaggggcctgcagggtctgggtgggtctcccaggagaggaatactgagtgggagatcggctgtctggagtgttctgatgcaagtctctctctcctgagcctcctcttgatgcaagctctaaagggagaagtcaggccctgcctctccagggtatagacggccctgctaggccccagttcttcctccttccccctttcccaggaaaggccagcccagtccatggccttcttgggcctctgggcacagagccaatgttcgtcattgcagctctcagcaaactgggtcatagctttccccacagctcagcctggggcctgggcagggctcccagcctgcaccgcctcccactgccagtggggcatgattctctcaggcttctgccccgaggccttcgtcgtcctcagggtctggacttggtcagtggcctttcaccagtggagctgccttcccagggagaaggagccgtgcgccagggcagggcccgtgccttagacttctcccgacccccagagcgctggtacacaggtctaggcaccacacagtgctttggaaattctcagtgaatgatgtttaataaagcaaaaaatgtcaaggtgtctttcttggatat

SEQ ID NO: 3101 - protein, 302 aa, Homo sapiens [sequence omitted]

SEQ ID NO: 3102 - DNA, 1788 bp, Homo sapiens
tgactgcgcgccccgcccggagtccccgccgccgtcatgcagtccccggcggtgctcgtcacctccaggcgacttcagaatgcccacactggcctcgacctgactgtgccccagcaccaggaggtacggggcaagatgatgtctggacacgtggagtaccagatcctggtggtgacccgtctggctgcgttcaagtcggccaagcacaggcccgaggatgtcgtccagttcttggtctccaaaaagtacagcgagattgaggagttttaccagaaactgagcagtcgttatgcagcagccagcctccccccactacccaggaaggtcctgtttgttggggagtctgacatccgggagaggagagccgtgttcaatgagatcctgcgctgtgtctccaaggatgccgagttggcaggcagcccagagctgctagagttcttaggtaccagatccccaggggctgcagggctcaccagcagagattcctctgtcctggatggcacagacagtcagacagggaatgatgaagaggctttcgacttttttgaggagcaagaccaagtggcagaagagggtccgcccgtccagagcctgaagggcgaggatgctgaggaatccttggaggaggaggaggcgctggaccctctgggcattatgcggttggcctgtctgtggggacatcggtgtgaagggaagggactgggccctgcagggtcagaacctccccacccccaggggaggccaggcagaagcctgggtcacagcacccagaactgcatggttccattttctccggggctgtggggccaaagtagaagcctgcgggctgcgggagcggctctcaccctaggagccagagcccaatgtgtcttattccccgtggacatgaaggggagggagggtgtggggatgccttgccaaccagatgcccagccccaaggatgaagcaagacatgtggggccgtagcgaggtgtcacatggggcagggaagcttcatgcccacgggttctgccagccccagcacagacccaaactggggctgggcctctatccctcctctgcctctgttcgcatagtaagaaggagtgaccgggatcctccccttcccctaccctaagctgtagcctgggtgactgactggcctgggcctggggtggggacgtccccaagccaaattactccagggtctctgctcctcgtggctgccaggggcctgcagggtctgggtgggtctcccaggagaggaatactgagtgggagatcggctgtctggagtgttctgatgcaagtctctctctcctgagcctcctcttgatgcaagctctaaagggagaagtcaggccctgcctctccagggtatagacggccctgctaggccccagttcttcctccttccccctttcccaggaaaggccagcccagtccatggccttcttgggcctctgggcacagagccaatgttcgtcattgcagctctcagcaaactgggtcatagctttccccacagctcagcctggggcctgggcagggctcccagcctgcaccgcctcccactgccagtggggcatgattctctcaggcttctgccccgaggccttcgtcgtcctcagggtctggacttggtcagtggcctttcaccagtggagctgccttcccagggagaaggagccgtgcgccagggcagggcccgtgccttagacttctcccgacccccagagcgctggtacacaggtctaggcaccacacagtgctttggaaattctcagtgaatgatgtttaataaagca

SEQ ID NO: 3103 - protein, 302 aa, Homo sapiens
MQSPAVLVTSRRLQNAHTGLDLTVPQHQEVRGKMMSGHVEYQILVVTRLAAFKSAKHRPEDVVQFLVSKKYSEIEEFYQKLSSRYAAASLPPLPRKVLFVGESDIRERRAVFNEILRCVSKDAELAGSPELLEFLGTRSPGAAGLTSRDSSVLDGTDSQTGNDEEAFDFFEEQDQVAEEGPPVQSLKGEDAEESLEEEEALDPLGIMRLACLWGHRCEGKGLGPAGSEPPHPQGRPGRSLGHSTQNCMVPFSPGLWGQSRSLRAAGAALTLGARAQCVLFPVDMKGREGVGMPCQPDAQPQG

SEQ ID NO: 3104 - DNA, 1340 bp, Homo sapiens
tgactgcgcgccccgcccggagtccccgccgccgtcatgcagtccccggcggtgctcgtcacctccaggcgacttcagaatgcccacactggcctcgacctgactgtgccccagcaccaggaggtacggggcaagatgatgtctggacacgtggagtaccagatcctggtggtgacccgtctggctgcgttcaagtcggccaagcacaggcccgaggatgtcgtccagttcttggtctccaaaaagtacagcgagattgaggagttttaccagaaactgagcagtcgttatgcagcagccagcctccccccactacccaggaaggtcctgtttgttggggagtctgacatccgggagaggagagccgtgttcaatgagatcctgcgctgtgtctccaaggatgccgagttggcaggcagcccagagctgctagagttcttaggtaccagatccccaggggctgcagggctcaccagcagagattcctctgtcctggatggcacagacagtcagacagggaatgatgaagaggctttcgacttttttgaggagcaagaccaagtggcagaagagggtccgcccgtccagagcctgaagggcgaggatgctgaggaatccttggaggaggaggaggcgctggaccctctgggcattatgcgctccaagaagcccaagaaacatcccaaagtggccgtgaaagccaagccctcgccccggctcaccatctttgacgaggaggtggaccctgatgaggggctctttggcccgggcaggaagctgtctccacaggacccctcggaggacgtgtcatccgtggaccccctgaagctatttgatgatcctgacctcggcggggccatccccctgggtgactccctcctgctgccggccgcctgtgagagtggagggcccacacccagcctcagccacagggacgcctccaaggaactgttcagagttgaagaggacttggaccagattctgaacctgggagctgagcccaaacccaagccccagcttaagcccaagccaccagtggcagctaagccggtgatacccagaaaaccagctgttccccccaaagcgggcccggctgaagctgtggctgggcagcagaagccgcaggagcagatccaagccatggacgagatggacatcttgcagtacatccaggaccacgatacaccagcccaggccgcccccagcctcttctgacccttccatgctggcccctggcccagcaggcctgtctgtggggacatcggtgtgaaggggggtcacagcacccagaactgcatggttccattttctccggggctgtggggccaaagtagaagcct

SEQ ID NO: 3105 - protein, 392 aa, Homo sapiens; identical to SEQ ID NO: 3099

SEQ ID NO: 3106 - DNA, 1793 bp, Homo sapiens
gcccggagtccccgccgccgtcatgcagtccccggcggtgctcgtcacctccagctccaagaagcccaagaaacatcccaaagtggccgtgaaagccaagccctcgccccggctcaccatctttgacgaggaggtggaccctgatgaggggctctttggcccgggcaggaagctgtctccacaggacccctcggaggacgtgtcatccgtggaccccctgaagctatttgatgatcctgacctcggcggggccatccccctgggtgactccctcctgctgccggccgcctgtgagagtggagggcccacacccagcctcagccacagggacgcctccaaggaactgttcagagttgaagaggacttggaccagattctgaacctgggagctgagcccaaacccaagccccagcttaagcccaagccaccagtggcagctaagccggtgatacccagaaaaccagctgttccccccaaagcgggcccggctgaagctgtggctgggcagcagaagccgcaggagcagatccaagccatggacgagatggacatcttgcagtacatccaggaccacgatacaccagcccaggccgcccccagcctcttctgacccttccatgctggcccctggcccagcaggcctgtctgtggggacatcggtgtgaagggaagggactgggccctgcagggtcagaacctccccacccccaggggaggccaggcagaagcctgggtcacagcacccagaactgcatggttccattttctccggggctgtggggccaaagtagaagcctgcgggctgcgggagcggctctcaccctaggagccagagcccaatgtgtcttattccccgtggacatgaaggggagggagggtgtggggatgccttgccaaccagatgcccagccccaaggatgaagcaagacatgtggggccgtagcgaggtgtcacatggggcagggaagcttcatgcccacgggttctgccagccccagcacagacccaaactggggctgggcctctatccctcctctgcctctgttcgcatagtaagaaggagtgaccgggatcctccccttcccctaccctaagctgtagcctgggtgactgactggcctgggcctggggtggggacgtccccaagccaaattactccagggtctctgctcctcgtggctgccaggggcctgcagggtctgggtgggtctcccaggagaggaatactgagtgggagatcggctgtctggagtgttctgatgcaagtctctctctcctgagcctcctcttgatgcaagctctaaagggagaagtcaggccctgcctctccagggtatagacggccctgctaggccccagttcttcctccttccccctttcccaggaaaggccagcccagtccatggccttcttgggcctctgggcacagagccaatgttcgtcattgcagctctcagcaaactgggtcatagctttccccacagctcagcctggggcctgggcagggctcccagcctgcaccgcctcccactgccagtggggcatgattctctcaggcttctgccccgaggccttcgtcgtcctcagggtctggacttggtcagtggcctttcaccagtggagctgccttcccagggagaaggagccgtgcgccagggcagggcccgtgccttagacttctcccgacccccagagcgctggtacacaggtctaggcaccacacagtgctttggaaattctcagtgaatgatgtttaataaagcaaaaaatgtcaaggtgtctttcttggatat

SEQ ID NO: 3107 - protein, 195 aa, Homo sapiens
MQSPAVLVTSSSKKPKKHPKVAVKAKPSPRLTIFDEEVDPDEGLFGPGRKLSPQDPSEDVSSVDPLKLFDDPDLGGAIPLGDSLLLPAACESGGPTPSLSHRDASKELFRVEEDLDQILNLGAEPKPKPQLKPKPPVAAKPVIPRKPAVPPKAGPAEAVAGQQKPQEQIQAMDEMDILQYIQDHDTPAQAAPSLF

SEQ ID NO: 3108 - DNA, 36783 bp, Mus musculus
ctgagccctggaaggaagaacagagaccctttcaacaaatatttctgccatgggcaagatcaatagatgggtggaaatgctgtcttgagttagacggagatagcactggagacggagaggcagggacacttgtcaaacattcatgggtggtgatgagtgccggctgaggcactgaagtgacctttggcttgagcaccagccatttggataccaatgagggccttgccttgtgctcacacaccagacaggactgagcaggaagcatcggactcgggtgagagagctttgatgggatgtgaagttgaatcacccgcccaacccagaggctcccaaccttcctaaatgctgcaagcctttaatccagcgcctggtggtgtgctggcctgcaaccataacagtattttgttgctacttcataactgcgatgttgctactattatgaattgtaatataaaaatcgggtatgcaggatatcagatatgtgactcccaaaagggtcatgacccataggttgagaaccattggtctaggagcttttcccccctctgggaaccttttgggggttcttattttcatcaataaaataaaatcacttttagaggggcttaaaaggaaacttaaggaccttttttattagagtttgagaggaaaacaaaactaaactaaaaaatgcagtaatgacaaactgaaaacctcagcagtcaccagggggagagaaattttaatttagctatggaggtcagagaaacagtgagaaagcccagagggtcaggaaaagcatgcttagccagagaactcatttcagaggatggctaattctaggttcttgtgtcccagggcaaagatttgcacagggggcaggatggttagaaacagaagagagagtttactaagacaattagattcaaaggacgaagtggagtgaagaaacaaaccctaaaacacccgttcgtgctgtgtgtagacttttacacaacctttctagttcctgcctcttcctcttgtactgctcagtgctgacacgtgttccttcatccacaggtaagggagagcttcacgtcttcctctgcaaaccggtttcctatgttattgcttcagttcagtccctcttcttgtgccccaagagcatcctcacaccagctgaggatggggccaggaagaagcgctacacaccagggtggtcaggctgagacatctgttagcagagctggcttggcaggagtacatcgtcgtgctgcagtggggcccacgagggacagagagagagggatgctccacccaggattggctgctgcccggggtcaggacgtgaggcttacggtaggggttaaacaatgtgggctctgggccggaacacgcttcgttcaatgtttcaaggaacagcctaatcggctgtatcagagcctgggaatgttcaaggccctggatcaggtctgagccggctgggaaaagcctgcagctgactagtcacaaaacagtcagagcactctgaccccccgccccctcccccacataggatacagaaagaaaaacaaaacaaaaaacaggggcaactaggggacactgcacttgtcacatgagacaggcttgcacaaaagcactggcaatggcatattttggagacgtagagatcttggtggcatttatcttccagaatgtgatttatattgacattgtgggaacaaaggaagatacaaactgtgctttctcaaaacgacacacaaatgtgcttaagcttctgaaaaggggacaggaaatgaacaagaatcgagtttttggttacagtgaaggaaaaaaaaaggctgtgccatttttcaagtcagctatacccatgggacaaactcttattaactttttccttttgtatgaactgggagtcagtgcttgactctttactgggtcttgaaccatgaaacagctttctggaaggaaaagaacagggaaataaatgaattccccagcctccagatgataaactccaagaaagcaaacaaaatctaaagcctccttgaaaccgagccctgggttgagagagggagaggcatttggccttggctttggacacagccatccaagcgtgggcaggcattaaggccaggttggcaaagtgggaaagagccagcctggagcttgggaaagtgggggaagtgagagaacgcaggagggcggtagagcttggaggaggaggactgaggctggaggaatttggaattacacagtagatggaccgcatctcttaactactaccatatgtgaggctgagctgcatcctgtgctgcccttttccttctaaagcaaatccctattactgtgtaatcagagccttagaggcttgagagcagcaggggttcaactgtcccttccccacatctcaaggacctctagctcccaggtaggaggaggtccatgccacaggtatgtaaacccctaaggtcaaagcgaagagcagtcccgggccccaaagaggtttcagtgggggagatgtaaggcctggggatctatgccatcctcagcccagaggccagcagcccggacttaactgcagagcaaaaggcactgcgtggctttgccttgccctggctcatgcagctctcctcctcagtcctcctttagaaaggacgagtggcatgcttggctcctatgcaggctactctagagcgcatctctagcctccatctctcactgcctcccctgctacacatggttgtccccatccgacagcatttgggtgcaaaggctgggctgaatctcttagatatggagctgggatgccaagcagaaactatctgcatattcctatttctggcctctcagtttgtcttttttgaagcaagtttctccttcatcatagcaattcaatacaaccaaagtaaccacatgtattatttaaaaaaatttttttaaaccgttacaacatatgttatatgttgtcttatatctggcgtgtttcctacttactgcttattggatgtaagcaatctcatcatatctagactagtctttccttaactggttacctagtattccatttataagtgggatggttaattttgtatcaacttggccggactactagatgcctgggtgtcatgtttgttcaagttctattatggaagttcctattaggtattcctggatgagattagcatttgagttggtaaactttaagtaagcaggttgtcttccataatgtagaggcagctcattcaatcagtttaaagccagaatagaacaacaacaacaacaacaacaacaacaacaaatttgtattccttcattcaagagaggattccgccagcagataacctgcagacctgaagcaacattagaaggctggtggatatacagcgggactacctctggctttgaattgcaattgtaactatggtacaatagtctatttattaggagtacattagtggactctgttttcatctttctgctcttacaggactacaatgagttacgttttcaaaccgggcctcatgcagatggcatgcccacgttcaaccctctatggtattttgcttcatttaaggaaattatttatcaagccatagccagactgttgtgggtatgtctctctgtaagtctcattttgaaagtcactagttattagagaagtacaaattgtaatcacaatggattatcctctccattttctaaactggctaaaactataccttgtcaaaggaaatgaagacagaatgtggagccattagaacctgaatgcctggctgatgggagtgttaaatggcagtgcatctttgtaaaacatttggcaccttcttaaaaataaataaatgtatctaggctgcaagccaggcatcccatttgtcagctggaaacaaaagtttaagtccacacaaaggataccatgccactctccacagcagctttatttgtagtactcaaaaaatggcaacaaacaaaagttcattagttggtaaacaacctgtgctccctctcatctggggctcctgcagtacaaagccgagtctcaaatcaattacatgcagccaaaatgaatgattaggaaaaccacataagcactgtcatatgtataacactttagaaaactcaaatttgtatacagtgatcagaagcttatcaggattgcctaggaaccgtgtgtgtgtgtgtgtgtgtgtgtgtgtgtgtgtgttgagggggtcaaggaaaatctcggaaatgacagctatgttaactgtcttgattattgtggtcatttcacagatatgtacctgggtcaaattcattagattataaactttactgcatctcaattataaattaacgtagctataaaattcttattttgaatgtacgaaggtaaattttgatgctttctttttgtagtctttctagaacagtcttaatctccatgtaaatgaaactgtcatgcaggtttcagagaatatgtcacattctaaagcaaagcatagtaatagtttctgaaaattattacccagttgcaagcttatattcgtgtgtaaccctaacctttactttgccttttatctcagattccagtgcttcttctcaagtggtcagctaagctgcgccatacagaactatcagtcttccagacacactagcctgttaccatgagaccagttgcaaaggctctagcatgggctcctctccctgcccagagcccagctccctttgcctggcctaagtgcagaggcaaaagatgagtgtgtagcagtgtgcccagcagagagccaagggagaggccaggcactcctcaccttttagcagcctgagcagatgccttccaacatgcccagacagaaccctggcaactgcccagagcctgggagtgaaggctgaggtggccagtggggagctcctttgtgaagccgctggcgcctggtactgtgagcactggtcggtcgttgggttggactgaggggagaagttgctgggccctctgggcttaggctgagggctcagcctcctccttggctgtacaccagcgatgctggcccttttcactttctcataggaactggagctctgaccctcaggtctgctactctgcagaagcaaagttctagggaaactctggtgtcttccatgtcatttccagacacccacttttcctcattccatccactcattctccctgtaccccgatcacagcggaaggaaggagcatctggctccattgcttacatcaagatgagattgttttccatctagacaaaaagagatggagcagagcttgcccacccatgctcgcccagtgggaacaaagctgcatgtgacccgcagtatttattatttttaaaaattaaagtccagatgtttggcaagtctgtatttgtagagggatgagagagatgcttgaaagctgaaatctttgcaaacaaaaaggcaaacgattctgcgttctttgatttcacttgcctgaaagtcacacactgctaattcgcaggcttgccataattcatggacacaggatctccctgtccctggaagacttgtacagctcattaaactttgctgtttgttttgattttagatactcaacaataactgtaaaattgaatgttgatgttggtgaactgtttcatcctcattaagatgtgcttagacgactccagcattaaaaacagcaccaaataagcttgatttacaaagaatctttaaatggagactgtgtgtggtattttaaaaaaccaaaccctcagttaggtgtataacggagctcctttccagtaggagtaaatttatcctccccaattaaaaaaaaaaaaaaatctgactccctgctgtctgggtcatgaagacatggactagagaagcagggggtggcatgtttaatattttctggaaatgacttgtagggtatatatcatgtgaggaattacctacctatgtctaatagttaagattcaaaaagagatagaaccagaagtggggttgcacattaagagatgattgtgggatgaagacatggttcagccattaagagcactgactggtcttcaggaggtcctgagtttaattcctagcaaccacatggtgcctcacaaccatctttaataggatctgatgccctattctgatgtgtctgaagagaatgacagtgtatcacatacataaaataaataaacctcttttaaaaaaagagagacctgactacaaggaactggcctgcactggtgtgggctggctaggtgagtctgaacccccaggcagctatgaggaagaggagaatggaaaggtacttatggagttgaagctgctgtcccagaaagggtattctcctccctagagggagcctcagctttgacccttcagctgacagaatcagacccaccctgataacctagaacaaacaatcttacgcaaagtcagctctgtgagctttaatcccatccacaaacacccgcatagcaacacccaggttagtgcttgagtatgaggagaatgctgtctgctcacttgatacataaagaagctgttacaactgattctcccatggcctctgagaaggctgatgggtctatgggtgagatcgtagctgggcaactgagggatgagtctcctaggactcatatgatgagagagctaagctaccctgctggaatcaactaaaaataagtgccaagacctccaaagaaaacaatgaaaacaacttacaagcaagacttgaacataaaggactgaaccagaagctagaagatggctctgagcagattgtctctccagcctcaacttgtcccttctaaaacacataagagaaaaaagtgtgtcctgcccctgccattcacaagatccctgtcttgatccatgtctctccctccgtgttggggacctagaggatggggcaggaatggtgtgttcagagccttgaaaccattcccagtgctctaggcacagacagacactaagacaatgtgtttgtgtgaatatatgcagtgtatttgtcctctgactttcacacaacctgtggcatgtgcatgccaaaacttatatgaagagatatgcacatacataaacatacagattaaaatggaggggtggtgcagctagacagctcagcgggttcctcaagccccagagcccacagtgtaaatagagaaccaacttcctttccatgtgctatcctctggcctccacatctaaatctgcattcatccatcacacacacacaatgtctacaatagtaataaaaacaatatgaaactgtatagggtgtggagggaaagctgaatgcattgcattggcttttgcttagtaataagccacttagaaactctgggcttcaaacaatgtatatctaaattttttctcataaccagataaactagacatctattctggtttgaatcagtccagttgaattgtgtggtcagctggtgaactgatctgaggatgatgatatgacacatctggccatgggtttgctgcctcctgggcacagcttatcctgtttctccctcgatgtgtagtaagataccacaggctctcctagagtttctgtaggtttgcaaaaggactgaagtggcaaggccaaggcactaccatttttccaagcgctctttgtttgttccacattagtggaactagtgaaagggattgagttcctgaaaaactgggctcgtacgtcttgatgggaactagaggctcatagggaagacaaatacaaagatgggaagattagttggccataagcatcaaagatagccttgaaacaaagcaagaacagaagggccaatggggttgtgggcatgatgaataagggggcttgagaaggtaggcttatacaacctatgcatggctgtgacaaaatatgattgtcagaataaaggggatgaggtgatcaatagattcccaggagtatcaagtaagaaaaaggtcaggtatggcaaagctcaaccatgagaggcttttagggttataaggctaggtttaacagcaacagcatggggagagggcagatcgaagggaaaagtgagaaaggcaggcaccaagcataaatatttttttgaacaagaaataagattgtaagtgttggagaagtagctcggtacagtttacctagcatgcacaaaccctggatttgtgacagacgtaggtaggggatcaggagacagaagcaagggggtcagaaactgaagagcatcctaagctacatagtgagctggaggctaggttgcgatcatgtcataaaacaaaaatagaaaggaaaagagaaagaacggggaagggaaattgagactatgaattaaagaggggctgggaagataactcagtggttaagaacacttgaggacctgggtttggttccgagtaccaacatggaggcttacaaccagtcgtaacaacagttcctgagaacccaacacccttttctggcctccagtgggcactttacccactgagccatctccttatgcccagtccatgttcttaacagacatatatagtatattttcattaataaacttctagcattgtctactggcttcaattatggtaggcaaaacactcatatacataaaacacagtcttctaaaaaaccaagtgttttctgctctttcagatgcctagagttcagttcccaggacccacatcaggcagcctgcaatttcagctccagggggatcttatgtctgcttctggcttcctctagcgactgctacacatgtagcgttttttcactcacacacatattctaggaaccttaaagacccacaaatcctgcatccccctcatttgcttcctcatacactaggctagctggccagagagcttgcagggatgtctcctcactcaagacatctgtctggctgtaacagctgggttttacagaaaggtaaagccacagcgtctggttttccatgaatcctcacgattgctttgcaagcactttacccacttaccacctcttcatatatactatattttcattaataaaattctagcattgtctactggcttaaattatggtaaaggcatggattttgtcctgacatctcttcccttcctctttccaaaatacttttgaggttctttgaaattattcagtgtttatttgattatgcctattatccacagctgcacactatggtacagtttcattccttctcaaggtagctacaagccttgtttgtttgtttgtttgtttttgagacagggtttctctgcatagcccaggctggccttgaactcagaaatccacctgcctctgcctcccaagtgctgggattaaaggcgtgcgccaccacagcccggctgatagccacaaatcttaaaacaaatacaaaataaattcagtcaaaaacttgactcagttaatgaggatcataagatgttagaaggaactatagagtgaatataaagcacccattgttgaagtaaaaatgataactgaatcacccaacttatgtcaaatggctttctctgagaagaggtatgagtcagtgagtctcgtgtaacatgctgtagaaatgtccagcatcccacagaaagttgaggctcactctggcatcagagcatgcagaaaagtgtggcttgtttctcacttaagacacactctctcattctctattttttttttttttttttgcttgtttttctggcctatttcaatgtccttcacaatctttctcttcaagaagaaaaaaaaaatcactattatctgtataaactcaacagctaagcggtttctccactttatcatgctgtcattttccttaatcccttggcctttggcagagtccagtggtatttattggctccctctaagtaggcttcagagagatgggggaaggacagaaatccaatcctttagcctacttgcgagccctcctttctggtctgagcctagagggccacgccagaatggtagccacgccccttcccgcaggcacgccccgacaggcccaacaatagagcacgaatacgtcacgtgggcctcgcagtgacaaagacaacgtggcgaaagacagcgccaaaaatctccgtgcccgctgtctgccaccaactccgtcttgtttcacccttctcctccttgcggagctcgtctgggagacggtgaattaccgagttaccctcaattcctacagcccccgacagcgagcccagccacgcgcaccgcggtcaaacagcgccggagagagttgaacttttgattgggcgtgatctgtttcaatctccacatcttctccaatcagaagccaggtagcccggccttccgctcttcgttggtctgtatgtggcagaaggcggagggagagattccgagccgacgtcccgcgagagcggcgccgggcgcccagagcgcaggcgcacaggagttggcaagggcccgggccgagggcgggccagaagacgcgtcctttggctgtggacaccgtcgtagagtcgtctgggttgaaccgctgggccgaaagcttttgtcaggggcctgggcgagaacgaggcccgcgaggttccggatggtgtccatgactttcaaacggagccgcagcgaccggttctacagcacccggtgctgcggctgttgccatgtccgcaccgggacgatcatcctggggacctggtacatggtaagggctggctggcagggccgctccaccaggccagtgcgcctgcgcgacaagtgggcctggtgggcagggggcggggacgtgaaagttgttggggcgctacttttcggggtgcttttaactgtgaactgaggctttacgagatggggctccccaggatttgggaggggatgggaataggatcgtcatttcgggttcgggaagtgcgcaaccctcatcccgccccacccccccatcgaaacaattattgtcccgcagttatgcagccagttcggacgttttgtccgaatcgaaagcgaaatccagttcgggtgcctcctgcagtttttgttgaggcgttcggtgatgtagccagaggtctctgttttgagtctagacgttagccagaatttacagtgggtcagattttcctcattacaccccctccctgccttgtcaggtgggttttcatcccaaggccgccttggtttggaagagatgtttattgaaagcctgctatgtccttactgacattttctgggctccaggatctgtgtgattctgtcacagcagatggacgggcttgttggttccatattcggcagaaagtcttgtgacttaaaaaaaaaattagttcccagtatctgttcatatgaacttatttgttgcgatttccaaacccgtgattttttaaagatagttttaagcaattaaactttgccgaagctttgaggaacatgttttgctggcgtgaccacttggatgacttttgaaatttcgtcgtgggggtggggggtgagggtaggaagtggagttagtgtgcagtttctgatacttacatgaagagcaaaggagggagaggcgtacccctgtcctctcttccttctctttactcttccccgcccagtatcttgaagtcattagtaactttggcagaacaccagatgaaaatcttcctcaggcagatggcttcccagcccaccccaggggactatcagacctctgcaggattgcagctttttccgtcttgtatccttatgtacattagagaagagccccaggaaagcttgaatgtggtttggtatgcttgcgatgaggttattttcacgttttcagtacttctgtactcagagagtcaccctactgcttctgtagaattaattccatcacattttctttaagaaactgcctcctgcatacattacctgagctgtagttctggacctggactagttactgacaatcagttgggttgtatatctcactttctgttgctttcctttttgttaagagtatgggtttttcatttctttgtccttcaccatcttccattctcttaaatgattaattcttgtcttccccatcgtcctcttacctccctgctttctcccagaaaatgaccttcattgaacttagcaaagcaaataggattggcacctgggattcttgcctgaaaacttcatcttcctgtttcttcttccatccctcctcttacacagctaacacccatctgcaactccagtccaaggagaatctagcctcttgtggcctctataaacattgcacacaagttaccacaaacatgaagacaaaacacccacacagtgaaataaaaataaacaaaaactaaaattaggaaaaaagtccttgctatagtttttcaatctgcattttgagttccctcaaacaaaggccacagcatcaaaaactccgactaacaaagagtatagagaaatgctgccaatatatctgaatgactgaagaggtgttttttttcatcttaaaaggtttgaagccctttataagtgctgggaattgcacccaggacagcaactagtgttcctagctactccagcgtgccctccccccccccccaggtttttgttttgtttttaacagagggattgagagagttctaaatctgtagcacaactgaagctcttggtgtgaaaagcacacacacacacacacacacacacacacacacacacacccgcctttgaaaagatgctgtcttgaatcaacttccagcttagaatattgtaaactgtttcagttggtttgttttaattcatataagagacttattgcctgtcttcagtgtaaagggctctgaggaacataggaaggggatgatagatggcccatattacatgccttcagtattcttactacttgttgcatggtaggttctagctctgcttactttggtcatgacatcatcccttgatggtgatggtattacagagaacttaggagcacagccagggaagtggaacttagagtcacagaggagaaggggcacagtgatgcagattcttatcacattgaggaggagaacatttgttttgcttagtatgttattgttggtgactttaaaaagtgtacaagccttagttctacagtagtgtgaaaacatactttctgctagttggggtgcacttaggagatgaaaacagtatcatgtataatgcctccaaataaagaggtctcgtccaaattctgcattccattgccatagcagagacataagctgacaacagctcgaatgacctttcctctttatttccgccttgccattgttcccttcctcaccactttgtcatgagcactgctgtttgattccaggggacagtatgtctggacctgtgtgggagaataatgagccgccaggttgtctggaccaaggcctgcatttatgatgctttctgtggtgtttgaaacgtggaggcacagcccttcctcctgctggtctgggacactctgtcagtgactgatattgaaacctttgaaatctagaattaacattgatttttttttttttttttacataccatcatgtatgtcaaaggattaattgaatggagcctataatataagttcttgggaggtggtatcaggagatcagaagttcaaactcagccttggtgataggccagcctaggctacataggatgatagctctaaaaccaaaccaaacccttaagtgttaatggttggtattgaataatagttctgggggacatagaaccagaggtaccaaacctgaagagtttgcatctaatagtttaaatgtgaaagaagtgcataagtaatacgtgactttagagtgagttcaggcttccatttctacattcctcaagtttacttctttatcatttgaagccagattttttttttaattctaaggagatatgaactcaagtacataataactcataaattaaaaaacctgtttcaagaaatagtctttatgatataaatgcatatttttgttctgttctttgttttttcgagacaggatttctctgtgtagaatgtcctggaactcacattatagacctaaggtggactttgtcatggatgttttaaccttaagtaacatagtgttaggaagaagtcaagacatcctcatgccacagaggcctttcacccgttagtcctggccagtatctctgatgaacagtgcagaaattctcgataaaaccccgatacacagaattcaacatcacatcacaaagtaaatcctcaggatcaggtgggtttcctcctaagggtgcaaggatggttcagcccatgcaagtcagtaaaggcagacacagaatatacacagaatatatacacagaatagagatccaggggctggtaagagatggctcagtggttaagaacaatggctgctcttccagaggtcctgagttcaattcccagcaactacatgatgactcacaaccatctataggaggaactgatgccctcttcatgcaggccgatgtatatgcagcagagcactcagacattaaataaaattttaaaaatggtataaaaaaagagagagagagagtgcgagggagagaaaaccaaatccctaggactatttcagtagctgcagttacatagttaatacattttgccatcctttcacatgaaaaaggtggagctgaagagatgacccagtggataagagattattcccaatacccacatggtgacttacaactttgtaactgcagttccagggatcagacagcatctagcttcttccaggcatcaggtatgcaagtggtacactaactagcaggcatgcaggcaaaatatccacatacatactggttgaaagtattcttaaagtggatatacaacacaataaaagccagccagataatactgacagctaacatcataccaaattagctcttctctaagatcagaaaccaaatcagcattgcttcctttcaacatttatgttcgacatagtattgaaagtcctagccaggggctggcgagatggctcagtggttaagagtgccgactgctcttccaaaggtccggagttcaaatcccagcaaccacatggtggctcacaaccatctataacgaaatctgatgccctcttatggagtatctgaggacagctacagtgtactttcatataataaataaataaatctttaaaaaaaaaaaagaaaagtcatagccagagcagttggctaagagaaacagatgaagaacttagagataggaaaggagggatcaaggctctgtattggcagatgacacaatcaaatatatagaaaatcctgaaaactgaaaataatctgagaattagtaaatttaaagagtagtaaaacaacttcaaatatcgcgtgtttatgcaccagtgaggactacctgaacaagaagttaggaaagcgcttgtgtcatagctaaaaaagcaaagcaagcaaaacaaacacttctgcgagtaactagccagaggtgaaaaaatctagtctatgatgagaataaaacatccgtgaaggctttgaacaggtcacaaataatgaaaagatcccgtaggcacgaatcagaactactagtattgttagatgctttgtacccaaagcgatctgtaagtgtgaggtagtacctgttatgttgtccttcacttactaggagaaaacagttcctaaaaggtgagtggagccactcagggctgtgccaaagaagtcttgagcaaaaaaacccaaaccaaaccaaccaaccaaccaaccaaacaaacaaacaaacaaaaacccccaaagctggaagtatcccactgtccagttttaaaatgtaaagctatcataaccaacacagcttaggcctggtacagaaatacagaaatagttagagaccaatggaaaagaatagaaaacccaaaaatagacccacactccccacagccaggtgattctcagcagaagtgctagatatacacatttgagcaagcgcattttctgtagtgaatactgctaggaaaatggcatggactagatcctgctctcaataaaagccaacttaaatattacaaaatagttgagtataaagctgagactaacctactaggagagaatataggagaagcactgacaaaagtctgtgttttagggttcctgttgctgtgatgaaacaccatgactaaaagcaactaaaagcattagaccaaaagatggaagtatcacactgtccagtttcaaaatgtaaatctgtcataagcaacacagcctaggcctggaacaaaaatagatatggactgttttgcttacagttgcacataacaagtccataataaaggggaagtcagggcaggaacctaggctggagcagaggctgtggaaatgctctgcttgctgctttgctcatcctgtgctcgctcgctagtgcgctctctctctctctttctctttctctctctctctcaaagaattatttattttatgtatatgagtacactgtagctgttttcagacacaccagaataggacatcagatcccattacagatggttgtgagtcaccatgtggttgctgggaattgaactcagaccctctggaaaagcagtcagtgctcttaaccactgagccatctcttcagccctcagcctgctttcttatgcacccaggaccacctgtccagtagcaccatgtctagtgagctgggccctcccctcccacaccaatcattaatcaagaaaatgaactataaacttgacggcaggaaaatctaatttaagcattttctcaaatgagagtccctcttcccaggtgacttgtaggattgaccagaggaaacacacacacacacacacacacacccccgcaaccaggatagtctgaacaagaaattaatttaagcattttctcaaatgagagtccctcttcccaggtgacttgtaggattgaccagaggaaacacacacacacacacacacacacacacacacacccgcaaccaggatagtctgaacaagaaattgttatttaacagtgtaaaggcataggcaacaaaagaaacacccatacagggttacatcaaactgaaaagctgcagagaatctcaacagtgagcagacagcctagagaaatggcaggcctcttctaactttatcccaagacattaatacctaaagtatatcgagaactcaacagcaaaagcagatagtcaaatttaaaaggaggcagctgagtagacatttctcaaaagaagacaagcgggactgacacatatgaagagcctctgagtcatgagatagcatctcatccagtgagggaatgccagtcagccagtccaaacaatgacatggtggagaaaggaagatctgtcctgtacggggctgtagtatagacactgggggaaatcgagtggaagttcctcgggttagaactgtcatagatcctactagtgggttgcctgtgttgtacccacagaaaatgaaatcagtgtatcagagatcagttgcagcccatggttaatgaagtgctgttcccagaagatgaggtaggcagtgagctgaagtgtccattgataactgtgttcacaattggtactgttagtggtaatgaatcagattgacatgtgcagcaacatggatagaactgaagattcaactgagagaatcaagctacaggaaggcaagtcagtgatcttactttcagattacaaagtagcttagtttatgaacatgatagtggtcaccagagactaaaaggtaagagcaggggccagtaagcatccgggtaggagtacagttagtgttctcttgcgcagagggtgactacagtcgtcaaaattacattcaaaaagctgaaagtaccggcagggtgagtatgttttcaccacaaacagtgaaatgcttaaggttctggaatgctgtcttgatttgacgagtacatgctgtgtaagtgtactgaaatataacactacccataaagatagacaagtattgtcattaaagaaaaagcaaggagaaattgcttggctgggcctgaatgtttccctggacttgaacttgttcctttctaccaaatcaaagactcttcattgtctctgcttctttactcatatgctgtgtacagtaggtgctttgcctgtgtggttgacgtgacatgtgctgctctacctgaccttggtactaggtttaccagtcttattttcagcttcctttcctgagtagagtaggataaaagtcatgagtattttggaatagtttgtatgtagtagaatatcttaaagactttttaaattatagttaacgtgaattttaatttcttgaaaaatccaacgggcagtttagtagctgaaatttatatacgtgctcagtggtaagtgcttagaatcagaagtactgcttttttcagaacagttactctcacatttaaagtaccgacccacagtgaaatgaacttggaaatgttgctaataatactaggcaaggacagtggagaagtcgatgatgtttttatagaagaaaaaaatggctttttaaagagtaatatatgtgatacaaatattttagacctgtggaccttgcatgtgtacaaccacatatatacacctgtgtttatgtgtggtgtgtgtatgtatttaacccccgcccaagtagttttggtatttcatttccttcatttggtagttagttttgcatgtttttcttaacataaatgtttttctgtgccattcaaagcttttttactaggatgataatttgcgtagcaagagtttgcagaatgaatttcaaacttaatttcccaacacaaaataacatgcctaacatgaaaataaaatatggtccgtttctctaccaaatgtttgaagacttggcctgctgtaagagcatacctttgttgggtgttaatcatttagggtggacagaagagcgtagtttcagatattgttgatagaacatcgggagtgccaaatgtttggacttccacaaggaggaggatgaattctgtggcgtttgttacggggttagtattagcctcagaccttactgatgtgggctgttgtcacacttgcaggccatacctcctgagaaactgcaaggaaccacagctgtagctctgcataatggagctgcttttaaaatggagtttctatctctgataagactaggggaattcatggtattatgatgagatttcagcaacatgtttggcagtgattcaagataagccttagcgtgcctgcatgcatgcatgtatgtgtcttaaatagagccttatttcatgatgattatacttcagaatgaagaaactagagaaaataatctttagaatgtcaaaatccagatctaggaaatcatggtgggcagaaatataaagatgaatttagttacagatatattgactgtagtttgcaagtagcttattggctcaagtataggaaaaacaaataggtgttatatagagttacttttgtgtgatattgcaaaaatgtacaattatctttggaattgtgagccagcttggggaacttgtcctttacactgaaacttacacaaaggggaaatcagaggggagctaaaatagctagaaaggtagaggggtggtttgaggacctgaacggatggttgctacagagtttggaagatgcttttgggtattagatgaacctactgactcaaaaggtagaattaagaccaactgcagggacagggaagggactccagtaaacttgaacaaagcacatggggatgctttggaggagtggcaggcatctgcatgtgggaaatcaactgataagtcgctaatgggcgtgtgaggaaatgtgcgcctctgaacatgagcagactatagtgagtctccagtcttactttctctgcatttcattctggtttattggcattagcacagggttaagcatctttatacatgctgtgaattttaaactgttctcacagtggtaatccaggtgttatctgagtgtctcctatttcataaccttgttactgtagttgagatagtattaaatatatgctcatccagagagtctgtgaagggtcctgctaggagttaatctaaaggtgttttctcctcaggtggtcaacctgttgatggccattttgctgaccgtggaggtgactcatccaaattccatgccagctgtcaacattcagtatgaagtcattggtaattactattcatctgagagaatggctggtaagtctttactttaaaagataccactgaactttatatgccccagtacaggggaacgccagggccaaaaagtgggagtgggtgggtagtggggggagggtatgggggacttttgggatagcattggaaatgtaaatgaggaaaagataccactgccaagttctatatatagccaattgtagactatatatgaatgttagagggcgattgatagaattgtgcttgagttgttcttcaaatggttaaattctttgtataataaattcaagctaggtgttacttaaactctttgttgagactattgtgatgacttttcccaaaggtgttcagcaagagggacagtagagcatttctggacaagaacatgcaatggacagtagacagtaggttgtatgtatgctttcactatagagaccggatagggaaatgggaaataaaagtggtttgagattttttgagagccttctgtgatgtatagccagggtcagaaattggtgtagatcagatggactattacagtagaatataaaatatagtgtacactgtagcaaccatccgttcaggtcctcaaaccacccctttacctttctagttattttagctcccctctgatttcccctttgtgtaagtttcagtgcaaaggacaagttccctaatctagctcttgttaagtggaaagagacttaacaccactattaaaaatggagtaaccctagaacattcatagaaatggtccttttaaactgatttattccctgatagcaattcgttttcattactggttttctctttaaaatacaggtataaaatgattctagttgagtttacattgttatatatagttatatcttaaatttacgcagaaaattttacttacacagaaaattatgtctcagtttgaaatacaatttctacatgcttagtttttagatcttaattcccaggattttagattttattaactttaatatgaagttttgaacttctttatatttgtcactacctgtgatccaaggatgaagatttgtatcttcctttttaaagattgttttgtttattttatgtgtgagtgctttgcctgaatatatgtgcagtgtggtgcctccagaggcccaaagaggcagggtgatatgaactgaggttgtctgttgctgtgtgggtgctagggatcaaattgtttctctgcaacagccatgaccctcttaactgctgagccctctttccagctctgatttgtgtctcctttcccttcccctcttccttccccctttctcttctcctccctcctcctcttccctatttttctttctttctttctatctttcttttgttaagtactttttttgtcttcacagataactattttccaggagccaagaagagtcctgtgtattctgtaatacagcataggatgatgcgcatgtgtactgtgtcgtgttattgttctaagtggaaatgtttctgatcctttttaaatacatcctcgtgacaaggactctgagagaagtgacaaggagtaatagccttttggcatatttttcactagtagtttctttttatttgaaccccctccttctcaaataataataaaccaaattttagagtcttattagcaccttcctccagtttttgagacagggtcttactttatatcttagtctttcagtaggaagaacctttaaatccttaacaatggaggtactctgatatgacacagtaattcatgttaaatactggttgcgtttataatgctcagtgacatgattatttgtataaatatctaatatcttcatttttggtgcccttttgtttctttttaagtcttcagttatgtgtatgtgtaggagtgtgtgcatgtgagtgcaggtgcctggaagtcagaggtgtccagtttctgcagcaggagttaaagcgcgcgattgtgagcagcctggcatggggactggggactgatctgctagagcagcaggctgagccagctctccacagccccgtctcctttagtttattcctgtctgtccagagtcgcaggatcacaggatcagcttgtgaagatgctcacccagtcaagtatggtcagatactgttggggattatttgggtgtgttctgtagagaatggtgaccataggttaacgcacacttagaagttgagaggaatagatgtgtgtaggggagagagggcaaactggaggaggccatggattaaaggtgtgagaccctggggtgggattaatggagacctttgaatttcaggttgtaatcttaccaaagcaagaggtacatctgtggtttcctatgagtaactcatctgtctgaagcaaacagcaacttctctttccagtgacgccctcatctcacgaaacccaagttgtgtgaattctttcacagtgtttccttgctctgcgtgtgttgcggcttgcctgttaggttttgtctctctgcacttagacatgtagagcacaagggactgtttcctgtatttacctggctcctgctccttcctacacagtcagttgtttaacatggaaaggcatgtgtaagtttttcagaatttcttaatgtcaggcttaggttttctttttcttggtcttagatcttttgagggccaattttgaaaacagttacagttaatttatacagaaacattttaaagtgtcattttttttttgtcatgaagaattcagtttctttcaatgcatatgttgtttaattagatttctgtttttgttttcttagataatgcctgcgttctttttgccgtctctgttcttatgtttataatcagttcaatgctggtttatggagccatttctgtaagtctgccgtgctttcctcgctccgagtttgacctttaccaaggctagtgattttgtgtgtgtatgctaagtggtactttccttctgcagtatcaagtgggctggctgattcctttcttctgctaccgactctttgacttcgttctcagttgtctggtggccatcagttctctcacttacttgccaagaatcaaagaatatctggatcagttggtaagtgtgtgtgctatttaaacatttccacttaagtgaaacattttaattgaaatcacgaggcacccttgctactatttaactctctttgccttatacagtatcttaaaatcactcccatgttaaaacctgtaagatagacataaatgattgttgtactgtaccatttggatagcacagtacaagacgtccgtaaagacagtgagtgtggacgagatagttgagttaattgtgattcagtaagatgttcgactgtgtttaggactcttaaggggctggtgcttcatctttatcagaaggtggcatgtgtctgtgtgcttgctgtacccttgtccgttattgatgtgcctgctgtgtcctagccctgggtaggaaactttagctgtttaggaacacctgctcttttacagactctggtgtgttttcccctctgtttgattggatcctttccattagaaggtatttcctttgctggccagtttttgaccctcccttcacttctaatgcctttctcctgactcgcccagagtcagatgagtgcagccaatcctttccagcacagtgagcttgtcagcagtaaatcatgtccttttgcctggcttgtagccagtgccgtgtgttctttgtaaccatccactgaagagctgagaccaaggtttgactcctgggaaagttacttcgccaaagacctgagcgatctcagttctcccgactttctgaacaaggacagagttggggatccagacaagtggttatattttgtcaaaagcacaagatgggaaataaccagcaaaatgaatattagctctgtccagaccttttagtaatcttagctattaaataggcagacggcagtggtccgtccgtcgatgatgggggtcccgggtgtgctgcgttcttctgtgtagatttgcagaagctgtcactgtctgctgtacatggttgtgttcttaaaatgctcaagcgcctggtgtgtccgtgcttttgtgttttcacagcctgatttcccatacaaagatgacctcctggcattggactccagctgcctcctgttcatcgtccttgtgttctttgtggtattcatcatttttaaggtaaggagcttgtgactcactcttgggggccctggtgagactgctcagtaaacctttttctaggatcgcagttgatgtagggtttgtagtgacagtcactgcatttaagggatggagtcccctctgtcttgtgtccagtgagtagaatttttgtgttttcaaaagtggttcaggagctggagagatggctcagtggttaagagcactgattgctctttcgaagttcctgagttcaaatcccagcaaccacatggtggctcacaaccatctgtaatgagatctggcgccctcttgtggtgtgtgtgaagacagctacagtgtacttacatataacaataaataaatcttaaaaaaaaaaaaaagtggttcagggtttatagagaaatccattaaaattcctaacatttgagctcaggaatttcctccacagtctgtcggttagcagaccaaagtctccagctagagtctctgtgagaaacttgggatgtttcagtgagagccagtcaggatgagcctgccttgtccgaggtcccttttccacagacagcgtggtgtgggagagatgagggtcctctgctccccgagcagcccgctgagctctgtttccctttcaggcttacctaatcaattgtgtttggaactgctacaaatacatcaacaacagaaatgtgccagagattgccgtgtaccctgcctttgaaacacctccacaggttaactactgttctactcaccaaactgtcactcttactgatgcctccagaagtgcacgtggggcttgactttcccttctttgccataagcgtggtttggaatttggatagtttgaacccacaaatgtttaagatttagtattttccaccaggagtcttgtgcacacagggctagagctctttacactgtttgcccagcttgactgttaggtttatttcttagtggtcctcacaaatgtttctggacagatatgagataattgacttgtgagaattctaagggatgcgggctgatggtcgtgtgtgtgtgtgtgtgtgtatgtgtgtgtgtgtgtgtgtgtgtgtgtgtgtgtgtgtgtgtacacatctatcagatccaaagcctggtccttggatagatgattgtgcaagcatctgagtgctgagcccacctctcagaaccttgtttgctactttgcaggttttcagcatatatgatacacgtggaccatattgagtcagcctgtcacttagaggactttaggctagagtgacctttagaaaggttttctattatcccaaagggcaggatagaaggtcattgtcctataagtgcaaattattatgaaacttcagacactgacagcttccattagaggagttagtggggcctcttcccccagatcctcagcccttgaatttgcactggagcgttattggttgcctgtcaagagaccctttatatttaatatataatttagcttgttagtttatcttctaggttagttcagaggaagaattctaattctgtcttatatctatccacacccatcacacccacccacccacccacccatccatccatccatccatccatccatctacttactcatttatccattcccatccatccatcctatccatccactccatctacccgtccattcgtccatctcatttacccatccttccctgcatttcgttcgtccatctgtctatcttgtcttggccactgatctactgctgtgaagagacaccatgaacaaggcaacttttatttataaaaaaaagcattaatcgaggacttgcttacagttcagaggcttagtctattatcaaggcagggagcgtggcaggagtgcacagcagcactgaccgtgctagagagatagctgagagctacatcctgatcataggcaggcaggcagactgacagacagacactgactctgacatcaactttctcgggttttgtgcttctacttatgacataaagtctgaaagctgattatttttggaaagaatttaaagtgacattgtctgacgtgattcttttctctcttcagtatgttttgccaacctatgaaatggctgtgaagattcctgagaaagagccaccacctccttacctgcctgcctgaggacattctgccttgtcaataaagcctataccagcttctcgtcttgtttattttacagaaagctgcagtgcgggcctctcagacttgtttgatagaaagtacactgtcttgtctgagcatttattttcaaacactaaggagcttttggacatttattaaaaactttttgttaagtatcacattttagagactttttgaagacaatctagattaagcaagagccaagtgccattgttagcctttagctgagggtatgggggggaggggtctccatgttttcttttttaactttgcactttctttgtataataatagtttatgttttggatgtttggtgccctgagtagtttccggggcgtgactacagtgttgaggatgaataggttgggtataacacctgcagtttccagctctatgaaacaggagagagagagaaatagcagtttgacttgactgtggaagatgatggttgcatgcttctcatttgtacgtttccatctttgtgataaaccgctttaataaagctcataaattttaccattgtccttaaatgtgcctcatgtttatgctataacttagagcgatcctgtccttgtgacaggaatatgttaggagaagtgttgctgggtagtttctcatcttaaaatttttatttattttgttgtttcttatgtgatgaaagaaactggtgtactggtttctggatagagggatgatggaggagtaagaggagaggagtcggggggagtgaggctggagccctttaggcagaggaaggcggagtgatcccaccatataggagcaggagtacagcctagcatttcaagaagccaggacaggacatttaaagatggccagtcaaagtcccttagagtccctcagtaggctctcgagggtttgtacacactggcttgtggggtgcttcattgtgtcctcccaaccctaatttagcttccaaggattgacttgagggtgattaagccaggattcgatttcagacacttggatggctggtacactggaagtgcataatttcagggttgttttggaatcctgaaataatgccactttattaaagtttgagagaaaataatgcaggcaggctgtaactctttagctgcccagaggcagatgggaaagaaggaaaagttaattgtatttgtaagcagccatgtggtagatagggactggttgaaagtgagcaagcctcaagtattgggcaaagcatgcccaggctttggtcataaagaaaaggtcctaacagaaaatccaacaaagttgcatgggtatagacaagaagtctgcatgtagctgcaccttaattaaagcccaggctcctctcaactcttatagccaaggttatcgacctggtacttggtgacatggctgttgccagtgcagctttttaatgaggaatgtactactaaaacagcaaatacagaactagtagttgtctgttgtgtaccatgcacaactgtgccgtgcttctgtatgccagtcggttccacaccagcaatactgcaaaggtaggacaatctgttgcactgtgacgttctcccccagctcatttgagggtggtttttggtttgtttgagtctcactatgttggcctgaactgcccaaatactgggatttgtgacataaatcactgcacccaggttcctcagattctcagactgccactgtatgtgtctttgggtttaaatgtttttgggcactgtgactcatttttctgtttttgtttttgttttttttttttttttttttttgcttttgttcttcgagacagggcttctctatagccctggctgtcctagaactcactttgtagaccaggctggccttgaactcagaaatccgcctgcctctgccacccgagtgctgggattaaaggcgtgactcatttttctaattccagcctggaggtgtgtggtcaaggccacctgcggtacatatcagtacccagccaggttggcctgtcgatggtggatggtggtggtgcatgtggggggtgggatgtgatccacacagggatgacaaagtccttgttactgtttttatgttgacatccatgcttggcaatactgaaacactagctggattctttccccttgttaccgctaagattacaccaagtgtctggatacactgagctctttgtggcatctaacatgctgcgctgctatgaagatgggtgccccaaaacgtcagaaacagccaagcaatccatcttgctgctaatagaacagcagttgaaaacagggtcccagagaagtgagccctcctggtcacaacactcaatagaaaaatcagtgtgtggaaaaaaagaatccagcctttaaacaagggttctgtgagaagcaacagctagaaaagccagtcacacgaagacatctgcataaccccacccacttgggcccctaagacagtcaaatctgtagaacccagggtgaactcacggtttcaagggctgtggggagagggccatagttaatagtgggtataaagcctactgagaatacagatacatgtacacataaagaggctgctgtcaaagagtgagctgtaaacagcaaaactacacacctctacctttggagccttgtaaggtttgtctttgctctgctcttaagtcccttctggaactttgtacccgtatcttggccttcttgccttctcttgccaccacaagtgtggctccaggctctacagaaggcccatgtgttgggtggaacatttcttccccaaacagccttctccctaagggtccttcacacgtgtggagtaatggagggatagcattagggattatctagtgtgcgccttaattcatatttgtgtgacctcatgcaaaattttaaatccaagcataaactttgctcagttgtgggagacgtaatgaaaagaaaaattaaaagcttggtggggggtagggagagacaaaatatatgttagtggtacagctttggagtaaagaaggctggagatggggcataggaggtagttttaagctccattaaataaaggtgtctcttagaaaatggcgtgtaagagctgaaggtgtgagagggtgtacatcacagacaggtggcctgcaggagcatgcggggagcgggagaaagttgaggaaggctttgactctcagtagaccaggaaatgcctagggcatcctgaacagatgagagtcatgagctgactttgcatgctgctttaaatcggctcaccattggggtgacagttacaaaaacctttcagttgtaaataccagtggcaacaaacaaaaaaagggctgggggtgtggcttggttggtggagtgcttgcctactatgtgcagtgccctgagtttggttcccagcaccacataaagatagagtagtggcacatgcctgtattctggaggtagaagcaggagaataggaagctcaagatcagactcacctacatagtgagctggagtcaccttgggctacttagatcctgtttcagcaacaagagagagtaagagaaaagacatagtttgcgtgtatgtgccttgtccataatcagaaaccagcagctactgtaaggttggctgtgaagagggcttactttaatgagattttaaatctccattctgccactgatttctgtctgaactagggcagacttcttatctatcctctgtgagcattacacacaacagctcccaaagaggaaggagcacaaaggcagactcgatgagtactgaaggaatgtacatactgtgctgtttaagacaaattatcacttagttcctcttttagcaagttaaggttaagttctataaaatgggtggtattcagagccatttccagaaagttaggtaaactgtaaattgggtgttattgtctctgttgtttggctaactggcttttgttaagcctttccccccttctcttttaatttgtgcctggtttcttccctcttagtacctgacacccaactcctctgccgttcatgtcttcctgcccttgggttcctagtatcaatttgcatatgcagaagtcttactaagttcctaccaagaacacttaccataagaggggaggggaagtagatgattactaaataaaaaccaattgtgtctgcagataattttcaaaatacattggaaatgaacctgcacataaaccaaactgatatttaatgtttttgaactgtaaagccaaagacgtttccactgatagacattattttccatctgtaactcacatgttcacagtcatcatagaacttactgtgttctgagtctaattgtttcaatgtgccctgcaggcaaaggatgcgatgctgtttccactgttttgctctgaaacagtggctcatccttcctaatgctgtgactctctaatacagttcctcatgctgtgatgacccctagccagaacattattttcattgctatttcataaccatacttttgccactgttatgacccataatgtaaatatctgatatgcaggatagtcttaggtcacccctgtgaaagggctgttcaacccccaagaggggtcaccatccacagattgagaaccactgctttaagagaacttcttacaaattagcctacacactgacctaaaggcaaacctgcttctttgttttctgaggttggtctgttctctagaaatgtgatttgggaaattaacttagactcaagatgggggctggagagatggctcagtggttaagagcactgactgctcttctagaggtcctgagttcaaatcccagcagccacatgtgattcacaaccatctgtaatgggatctgatgccctcttctggtgtgtctgaagacaacaacagtgtactcatagaaaataagtaaatatgtctttaaagaacaaaaaccaaaaaccttaagactcaagatgaatgtcaccaaatactgtgggattctaagcatatgagggaggcagcttgggtgtagagggtgaagtgcgggagtgggagcatgggggttgggtggggggtgggatcagaagactaacatcaattcctttcttcattgggttatccagtcctgtgaagtgtatttaggatgacaggctccagttcctctgtaaaatcaggaagatgtaaatcctgacttttgtacttctcttagttgttctaaggctcaatcaaggtgacgaacaggagggctggctgcctacaaatcactctgcagatattatcttgaggtgtgtgagagagcaagccacaaccagggaatggtcaagatggaaaagaaaagtatttgacctggaaaccaaagaaagagtgactttgtttctcttctgttagaaaatttaaatcatgctgtcatggttgatgctggtagccccagataccttgtttatattcatggctggctcatcaaccactcctatggctttagtgagcaactcagactacaaagagtatcatcacagagtcctccctcctctgatcttatgtgcttcttatttttggttaaatagttgtcatttaaagagaagattaatcataaaatgatgaggtatctgtttaactttgtagcacaatgcattcttttcccatctggtagtatttttcctttgctggagaaacttcctttgacatgtttttacaggtgattctgctgatgatagggtttttttttttggcttttggcttttggctttggcttttggcttatatgtcttgctgtgtctttattctacctttgctttctaaagctatttttgtagggtataaaagatgttcccgcactgttttcttgaacatattgttttcagagagaaatttactgacttttgttctactctgtatagaacattttttccccttgagcaattcaaacattttgtagcaccgattttctattggtttgtctatgatgttacttaaggttggctttgtggtctcaaatgtttgctgtgcctagagttcattgagggcttcagatctgtgggtttgtgggtttcatcatgtatggaaattctttacccattttaaaaaaatgtttgttttatttatatgagtacactgtagctgttttcagacacaccagaaaaggacatcagatcccattacagatggttgtgagccaccatgtggttgctgggaattgaactcaggacctctggaagagcagtcagtgctcttaaccactgaaccatctctccagcccctagccattatttctttaagtgtgttttctgttctccttgatccctccttcagacatcccgtctggctggaaaaataaagatatgtttcccatggagtgatttgagatcattcttgagagttggattaagcagatgtggctagaatatttgacggtttatttaataccagatggaccagagatgtcaaggttgggtcatgcctgtgcagccagaggtatagtggaacgaagggaggaagacctgttatgggggatgacgtgaagttcactcttagatgtgttgagtaaagcacttctgtgatctttagggagagagttccaaaggagagttccaaatgtaatgtacagatttgagaactagtcctagaggggtggtaggtgaagtctccctgtagatacaagttctaatatacagtacagtataaatcatggcagtagggagtgggctggagagatggctccgagtgcacacttctgcagaggactagagttcagttctcagcatctgggtggaggttcacactcatctggaacttcaggttagatgaatctgtgctccgttctagcttctgtggctactagactctcatgtggtgcacaaacacacacacaaaatcacccatatacataaaataaaaacaaacagatcttatccatgcatggtggcacatgcctttcttttgtctgagcatttgggaggcagagccaggtccatctttgtgagttcaaaaccaacctgatatacatagctagttctgggctagctagagccacatgggccctattgcaaaaaaaaaaaaaaaaaaaaaaaaaaaaaaaaaaaaagttccaaaaattaaaaataacaaaaaaagtcaatacagaaacattaaaatgaaatatttaaaaaaaactacccataatttattccttagtcttggttcaataattcttttttttttttttttttaaacacagttgctcacaggcaactataaatcagaccattgtcttggtgttattttaccccagtgggagcctagtggtggctgaggaaccaacaccttgctgaaaaaaggtcaaggaaggctactgtgtggtactgatgtccaacacagagaagtctgttgtctgtccatgagatggaacagagcaaagcctttcctctgaaaaagcagagcccggctgtttcttcttcaaacgctctctcacacatgatgaccaccctgccacagtaagtcaaaacagctctattccaggaactgctgtcttctggcctctcagtcttatctttgaccgagagccatcatgtgccaaggtccagtttctgggagttgagcagtgaacagttcaaacattgtccttgtgttcctgttgcctatactcaagagctcatcacatgcagggtcagcaaggcagctcatctcttcatcgactgttccccagccccctcggagacatcgtgccggctttgaacttgatctgtagcagaggatgacattgacacttcccattttcctgcctccgtgtgtgcctggatttatcagcctgcatggtttatatggtgcttgggaccaatcccagggcttcacgcacactaagcagacactttgctgagctactcccccagccactttctcttttcctgtgtgtgtgtgcgtttatgtatgtaactaaggcatgggtttgttgcatcatgggtgtggaggtcaaaacttctagtgtagctcttgagcaccagccttgtttgagatgggctctctttattgtctgtggctgtgtcccactgtagaagtgctgaggttacaggtgtggattactgtacccagctcgatgtgaattctggggttcagaactcaggtccttatacttcacccaccagagccagctctccagaccaacacttcttagaaagccactaatgccatcgtggcagtgttccctcgtgacttctttcaggcatgcttatttcccaagtagtctgggaccttgaggcttaagttcccgacttctgaacgtgaagagtgcacattctaactacagcagtgtgttcatgttactgtgggatcggattccacaacttctcattttgcagaattgaaagcttacagccaccaatcaactccaactgccttccttcccagtttcccaggagccagctttccactgtttcaatgcaaactgactactttagatactccttacaaacggtatcattctaaacatgtctcctgtggctggcttatttcaccttgcaacatgccctcgaactttatctcgaaggctgcttagtattcatacatgcagtgtgatggttagttttgtcaacttggcataagctggagtcatcggaggagagaatattgactgagaaaacgcctctgtaagatcgagctgtaggcaagcttgtaggacactttcttaattagtgagcgatgtgagagggaccaacccattgtgagtggagcaactcctgaactggtggtcctgggttctataagagagcagcctaagcaagccaacaagcagcactcctctgtggtttctgcatcagcgcgtgtcttcaggttcctgccttgagtttctgtcctgactttctttaatgctgaacagcaatgtggaaatgcaagccaaataaaccctttcctctcaacactactttggtcatggtgtttcatcgcagccatagtaaccctaagacatgcagatactatcttctgtgtatccactcacccagaggacaccaggttacctctacctcttagctgttgtataatttgtaggagacatgactgtcaggttaccacgcgctggatggtagaaaggcaacagtcgtggcagaaaagactggatcggctctgttgagactcattcatgctcattgcagtggttgaaaatccagctcagctctcctcccctgttagaagcccttcctacgcacacaggccacttttataacccatcacgttcccctaacagtatactatctgtgcatcttctctcacacagtgagttgaaggtctcccgagcagtttccagccctgtgctggttattcttccggagaggaagtgggtgttcttccagcaaaccggaggctctttggggaagtatatgtttgatttactattcctggtagtataagtttaaatgtttatgaatatttaaaacggggctaaaagcatcccattcacgatgctagaatttgtgaggcctatccttaaaaaaaaaaaaaaatcacagcaagttttcttggccggtgaaaggtgcgttgtgtgaggctcttgttctgcagtgggtacagaacttgaagtttgtcaaacagaatctgggggcacagatctggccgggatagagcaggagtcccccaatcctagcctggttttacaaggaggcaatcggccaggaggcacccagccgagcccaccggactaggcgggcagtgaccactgtgccgctggccgcctagtcccagacattccgctcctgccactggaatgcacagacagggcttcttgttggcctttggcggttcccgggctctcgtggcaaggccttctagtgggcggggcggggcggagcctcagaagcgggacctttaaattggttgccaatgtgaggccctatggctgagacctctgaccctgtgtaccccagttacctcgcggctcacagaccccggcaggtcgtcaagcccatcatgttgctctcagcccccttacgccacctcccggggcttctgctgctgctctggccgctgttgctcctgccttccctggctgctcctggacgtttggcccgcgcgagcgtccgccggctggggacacgagtccccggaggcagccctgggcatctctctgctctggctacttccacccgcgcgccatattccgggggccgcggcgcaggtacagtggggtgggtgggtggtaaacttattctccagagagggtgccacagccatagctgggaggagggaagaggggccgggacccaggaacgtagcatgctacatctacgtgcctttatcccagcctcaggcaggcagggtgctgcatcctttccccctgcagtcctgctcagaaactgagggtctgacaacgcaggggagcgggtagggctagaatgtaaggtcatgcgcatatagcatctggtatcctgaatttccttgtgatttgggaagggggcaacgtgcacctgtaggagcgccagccagggaatgggggctcccagctctatctggccttggtcttttggctagggagagcaaacttttcctgacactctgtttgctgttacctggaaatcttcgtctattttgcattcactgtgtgccttttttcctaagaagaaaggatttagaggagactcagaatatggaaaaa

SEQ ID NO: 3109 - DNA, 1696 bp, Mus musculus
caactccgtcttgtttcacccttctcctccttgcggagctcgtctgggagacggtgaattaccgagttaccctcaattcctacagcccccgacagcgagcccagccacgcgcaccgcggtcaaacagcgccggagagagttgaacttttgattgggcgtgatctgtttcaatctccacatcttctccaatcagaagccaggtagcccggccttccgctcttcgttggtctgtatgtggcagaaggcggagggagagattccgagccgacgtcccgcgagagcggcgccgggcgcccagagcgcaggcgcacaggagttggcaagggcccgggccgagggcgggccagaagacgcgtcctttggctgtggacaccgtcgtagagtcgtctgggttgaaccgctgggccgaaagcttttgtcaggggcctgggcgagaacgaggcccgcgaggttccggatggtgtccatgactttcaaacggagccgcagcgaccggttctacagcacccggtgctgcggctgttgccatgtccgcaccgggacgatcatcctggggacctggtacatggtggtcaacctgttgatggccattttgctgaccgtggaggtgactcatccaaattccatgccagctgtcaacattcagtatgaagtcattggtaattactattcatctgagagaatggctgataatgcctgcgttctttttgccgtctctgttcttatgtttataatcagttcaatgctggtttatggagccatttcttatcaagtgggctggctgattcctttcttctgctaccgactctttgacttcgttctcagttgtctggtggccatcagttctctcacttacttgccaagaatcaaagaatatctggatcagttgcctgatttcccatacaaagatgacctcctggcattggactccagctgcctcctgttcatcgtccttgtgttctttgtggtattcatcatttttaaggcttacctaatcaattgtgtttggaactgctacaaatacatcaacaacagaaatgtgccagagattgccgtgtaccctgcctttgaaacacctccacagtatgttttgccaacctatgaaatggctgtgaagattcctgagaaagagccaccacctccttacctgcctgcctgaggacattctgccttgtcaataaagcctataccagcttctcgtcttgtttattttacagaaagctgcagtgcgggcctctcagacttgtttgatagaaagtacactgtcttgtctgagcatttattttcaaacactaaggagcttttggacatttattaaaaactttttgttaagtatcacattttagagactttttgaagacaatctagattaagcaagagccaagtgccattgttagcctttagctgagggtatgggggggaggggtctccatgttttcttttttaactttgcactttctttgtataataatagtttatgttttggatgtttggtgccctgagtagtttccggggcgtgactacagtgttgaggatgaataggttgggtataacacctgcagtttccagctctatgaaacaggagagagagagaaatagcagtttgacttgactgtggaagatgatggttgcatgcttctcatttgtacgtttccatctttgtgataaaccgctttaataaagctcataaatttta

SEQ ID NO: 3110 - protein, 231 aa, Mus musculus
MVSMTFKRSRSDRFYSTRCCGCCHVRTGTIILGTWYMVVNLLMAILLTVEVTHPNSMPAVNIQYEVIGNYYSSMADNACVLFAVSVLMFIISSMLVYGAISYQVGWLIPFFCYRLFDFVLSCLVAISSLTYLPRIKEYLDQLPDFPYKDDLLALDSSCLLFIVLVFFVVFIIFKAYLINCVWNCYKYINNRNVPEIAVYPAFETPPQYVLPTYEMAVKIPEKEPPPPYLPA

SEQ ID NO: 3111 - DNA, 39230 bp, Homo sapiens
tgtcatttcccatttttccaatcaatcatgtgatgtgaagggcaaaaggaaagtgccagctttcccaaatgcctcccctgatgcctttccagagggaactgtgagaagtaaatgttgtttattagtcaccgggtctattgtattccactatagaaacccacatggactaaaacatcagtccagcttccctggatggtttcccggaatccacctcccatctcatgagatggcaatggctatcacagctcggaggaatctgactccactttcactatgaaagttttgtcatgttgagcttttatgaagttacatttacttcttggattaacttagaaacagccaaattatacccatttcttggagtctatagctgtgttttagtttgcccttcttttaaaggaaagtctagaatccaatgctaataaatactttgattaaaatgtactccttttaatgagatcatgtcctttgcagggacagagatggaactggaagccattatcctcagcaaattaacacaggaacagaaagccaaacacagcatgttctcacttaaagtgggagctaagcaatgagaacacatggacacagggaggaaacaacacacactggggcctgttgggggcggggggcattgcggggagggagagcatcaggaagaatagctaacggatgatgggcttaatacctaggcgatgggttgatctgtgcagcaaaccaccacggcacacattgacctatgtaacaaacctgcacatcctgcacacgtaccccagaacttacaataaaagttgaagacaaaaaaaaaacctatactctttttaagctacacaaaaggaaaggaacagatcttcctcacacccctcaaaagaaatgaactcgacaaacaccttcatcaggaaggttgccagaactatgagataatccatttcttgtttaagccacccagtttgtggtcttttgctatggtagccctagcaaaacaatgcagatggtttctctttttaaattgtgtagccaatatctttttgctcctcctctgaaataaaccaggttccaggaggacttgggtgccaccaggtctgctcaccgaaatccattgacaagatgccacacatttccactacatggtgagtccctcactttaggaatcatgtttactgatgctttctggattctgctgccacttgaacctcatagctctttgccagtttctcctatatggcttctgtctaatcttagctgctctcagcagccctgattcatattttgaaggctatggattatatctgctcccaaatttgctgaagataagtttacattttttgttgtttttgtagcatttaaaaaagaaaaaaagaagaaagatgctgaatctatgttaccacattcacaccagaagtccttaaagttaacatttaatcccataatcctaagtagtgaattcagcaaagcgcatggaaagcacttttcccatggtgataattacatagtgcttttcatcttcaaggtagttggccaacacttactaattaattcttctaataccctggagcaattaaaaataaaaaccacacatttaatttgactagaggagataattaccaatatcagcagacaagaaatcctgcaagggactagagatgaataattaaattgtggtggaaatatttcaaggcatgattgccttctgctttcattacagtaagaacattaaaccttgattaagaaagaaatcttatttcccttttacaggtgaagaaactgagattcagacaaggagctttttgttaagcaaatactaattagccaataatctaaatggaagttaatggagaattgtttaaactcagtgctatggtctgaatgtttgtgtccctcccaaattaaaattaaaattctaaccccaaggtgatggtattaggaggtggatcctttgggaggtgattatatcatgagggtggaaccctcatgaatgggattagtgcccttatataaaaaccccctcaccccttcaactatgtgaggacacagcaagaagatgccatctgtgaactggaaagcaggccctgatcagactccaaatctactgacaccttgatcttggacttcccagtctccagaaccatgagaaataaatttctgctgtttataagctgctcggtttatcgtaatttgttatagcagcctgaatggacttaacacctatggtattaagaattttgaggccaggcatggtggctcatgcctgtaatcccagcatcttgggaggctgaggtgggtggatcaattgagatcaggagttcgagaccagcctgggcaacatagtgagacatcgtctctattttaattttttttaatgaaaagaaaaaagaatttgaaaatcctaaatctgcttttcgcctctattaaaaaatcttcaggtggcagctcttagtatcctagagtcacattctgaatatttgtaaccattgtccacaagggcagtcagaaggctcaagttagtggtttctaaacttactttttggtctaaaacctcttcatactcttaaaaattatagaggacaatgaagagcttttgtttatctaaggtaactactgatatatcctttactagaaaggaaaatagagacaatttaaaaatatttctaaattgattttaaaatgacaacaataagtccattattggttaatatagacaacatatttttataaaaaataactacatttttcaaaatataaaaaaagcttgcaagaagagtggcattatttaatattttgcaaatctgcttaatgttttgcttgatagaatagatagaataaatgtggataaaacagaatagatagaatagatacatgtggattctcatatctgcttctgaactcaatctgttgcgatatgttttttgttgaaatataagaagaaaatccagtcttatagatacgtagttggaaaagtgaggagtattttatgagcctttttagataattgtggctattcttttttgattctatacgaaaacatagtcaatggtaattccttaaaaggtcagttgcagtgtggaatctgaaacctaccagtaaacttttcaaactgttacattagaaatcattggtctatcttgcatttgactggctcttttatttatgcatgattttataagattatgccttggttctttggcaaatggctcatttaattatgcagatagtcaaatgttgataatattagacaaaaacaaaaatcacatcagtttattttacctcgaatctcatcataaaagtcttgaattatcactgtcaagttcatggtggtggacacaatttcttccaaatctctcattttcctcttgaaagctctagtttaatcactgctcacaaatactctagttgctttccttgaagggacagacaggcttacttcattcattttcaagaaaatgactgccaaatactcatgtctgaatattaatatttgcctgtcagtcgttctttaaaacaaaatagtactccatgaaaaagcggctagttcggttcccctgccttggcctcccaaagtgctaggattacaggtgttagccatgagcccagcgttgctatattttaattaattaacttttttccattttatttttagttgacaccattatataaattcacaggatacagagcaatatttggatacgtgtgtaatgagcaatgatcagatcaggaaagttagcatatctatcaccttgaatatttatcatttctttgtgttgtgcacattcaaaatcctctcttctagattattgaaaatatgcagtacatttttggtaactatattcacctcacagtgctgcagaacactagaatttattcctcctatctagctgtacagtacttttgtatctgttaaccagcctctccccatcctcctctccctccttctcttctcagtctctaataatctttattctactctctacctctgtgagctccattttcagctcccacatatgagtgacagcatgtggtatttatctttatgtacctgatttatttcacgtaacataatgtcctccaggttcaggtatgttgcttcagttgacaggatttcattctttttatggctgaatagtatttgattgtgtatatacattttccttatccattcatctgttgatgtacacttaagttgatgtacacttaagttgatgtacaccaacttaagtatattccatgtcttgactatagtgaatagagctgcaatgaacatgagggtgcaggtatctcttcaatatactaatttccttccctttggataaatacccagtagtggggttgctgggtcatatggtagttctatttttagttttttgagaaactgccatactgtttttccataatgactataaatcaacttttgacattaattattggcttccattgtggtagatgaagaccgatcactcttggactgtcatctgttccccttcctcctaaccctcccaaaatatacatatctcaatgttttataaaatacccaatattcaatgtttatttgattatgcccatgtaattactattcacagctacacactgtggtacactctgattacattgcttttctaaatttttgtttttcttgaacttatactaattgccttgtttactaaattgcttaattttctttgtgcttgtcatttgctcagttttgccacactttcccaatgcctttcattgtagttttcctgccagatctacccgattaggtagcctatcagtgctaatttctttcttgctccctgataccttcattctcttctattagtactggtggcttcctaggccccctgcacagctgtcatcctgagacttccttttgctttcatcttatgaaatttcctcggcttttgtcctaagtttgatttctggttttttggttctcatctcttcctcttggttttctccttttttttggtggagtacatcctcaagtagcttcattaagataaaaactcagtagaattacagaaggcaaaaatgatgatcgtgctccaatctgaaatggttgacctctacacctaatgtacagtcttcatactgaaatctctattattctctggagtcttcatccacatctcacttatgttggatatcctgttttctgcatcccacattttcctctttaatgtactcatttcattttgatggagcataacatctggtggctgagaaaaagatgtttaggaggcaaattttttgagacttatctgaaaatgtgtttattatatccttatacttgacagtttggctgtgtgtagaattataaattgtaaacattttctatgcagaattttgaaataaaatctctattgtgttctagagtccagagttgttgagaaggctaaggctatttgactatgaatttttctatatggctcatagaaatcttctctttgaagctcatagaatcttctctttgtccccactgtcttgaaatttcactcagatgtgcctttacatggatctattttattccaaaaatatggtcactcagcagatattttcagtcttggaaattcattctttcagatctaggaaatgttgttatgatgatgacttcctctctctttcagaaattcctattattcagatactggatatcttggactaatcctctaattttaattttattcgttcttattttacatgtctttgtcttttgatttgcttctgggaaactttctcaactttgttttccaatcttgagtttttcatttctgctcccatgctgttaatttctaagaattttttgtcctgtataattgttatggcaccttattcttgatgtatgctcagagtgtcttttttttcttttctaagttctcttgacattttctcctagaccctattttccaattgtctggcctctgtcttccatgctgagggatttacttagagcctggtatccctacattatctgttctccattaggagtggggaattgaaagactggctgtaaactctgacgatattggtgagatttgtcaactttgagcttcactttaatctatctgaagggttggaaaactaccaatgccattatctttaggtctttcctcttggatgggtcatggagtggatcggcttttgtggggctagaaacttacacaattagggacttttttttgtttgtttttgtttttgagacagagtcttactctgtcacctagactggagaataagtggtgcgatgttggctcacctctgccttctgggttcaagtgattcttgtgcctcaagcctcccgagcagctgggactaaagacatgagccaccatgcccagctaatttttgtattttttgtatagatggggttttgccatgctgcctaggcttgtcttgaactcctgaactcaagcgatccgcccaccttggcctcccaaaatgctgggattacaggtgtgagccacatacctggccaggaagctaaattatttctatcaagatgaactgtgaatcaattaaacctcttttctttataaattacccagtctcaggtagttctttatagcagtgtgaaaatggacgaatacatggggaaatcatcttgtaaataagtgacagctgggaaaagataaaaggagaaaagagcctgacacacagccctcaacaacaccaatatttagggggatggacagtagaggagggaactacgaagaacaataagaaggagctgcctgagaagtacacagaaaaaaatagtggatggttaatcagaagccaagaaagaatttctagctctaaggaagagtcaacaagtaaatgctttaggagatgggatgaagactgaaaatgctcattgactttttcccctgtagactatatacactccaggaaaggtgcaatatctgccttgttcgttctttcttttaataccttttttattttagatttttgtggctacacagtaggtatatattgtgttgttcattctcgtatcatcacatggaatagaatagatcctcaataaaaataagttaaagtaatgtgaatagactaacacatttaaaagagaaaaatagattaaactatgttagctaaagagcttcaacctcactctaatttctttcgttgtgagttttcctaagctattttctcctaaaaatgttaactttcctttccccatccccaaaagatgggttgttttgccaatagtaccttacaattttctcaaaaaaggtgtatatattagataaaaattatctagacaaaactccataaccgtatttcacccctctaatcccgttatgtatgctattgttgtgccaaactcctactaacctcaatagagaaggtaccaggttcaagaggccaagaagagactggagagccagtaaatgagacatgggtttgtattaggagcttacagtccagtggtgacagaggggaaagagtccagtggcagcgggctggacagaagaaccagctatgtatagaagtggtccagtggcagtggggtggacaacacatctcccttcctgctgtcctctggcagcgggctggacaacataattgcacgtcccaagggcaggaaaaccgcaactgcctgtaaacatcatgcagtttatacagcattttcactgaacaccctcccactaacgacctccacttggcaacctgcatttaacccaaaactcagggccctaatcccctgtatggcccatgttccaatggatgggccggtgggtgggggtgggggtttaagatgtttatcatagacacagaacaaatctccaggttggccactcccagattccctagctcagagcacacattcaggtgcatctaccatacagggtcattctcagggtatgcttacattattgctatcagatgcgtttatgttgcaggtctctaatgatttacacctccctggttccttgcctggggtagtcccagtacagggagaacagcccttacgagctgatctgatgccatgttaggtacacctgattttgaattcattttggcttttagagaaatcggataatttcccgattttttttttttcttttttttttgagacagagttttgctcttgttgcccaggctggagtgcaatggcgagatctcggctcaccgcaacctccacctcccaggttcaagtgattctcctgcctcagcctcccaagtagctgggattacaggcatgtgccaccacgcccagctaattttttgtatttttagtagagacggagtttctccgtgttggtcagtctggtcttgaactcctgacctcaggtgatccgcctgcttcagcctcccaaagtgctaggattacaggcgtgagccaccgcgcccggctcccctgatcttatctttgtattcttttttattgtattgtatttatttctgtctgccacatttcatatcaagacagaataacagtgctgcacattaggatcacctaattttaaaattgacattttaaaaatgtcaatgcccaggtctcacccatgacagttaaatcagaaggtctggaatagtaagcaggcatcagtggttagtaaagatcctcaggtgatgccaatgtgcagcaaagtttggaaactattggcacaacaggttttaatctcagttgtgacactggccttgcaatcttggatatgtaatttaacttctctgtagagttaaataacgtaagagtacctatctcagttagttgtaggaatgaaatgattgaaaataaagtgattggatctgtgcctagaacaaaataagggatacgaaattgtggggcggggttaagataatctactccctacataagtagagaaatgtcataattcattctgagttagccagccacaccccatcctttagcgtgggcgggcttaactactgcttcccagatggtttgaaaataagctccatggacaactccttcagtggtgaatagtctctgctctcctaaaatttgtattttattggggagataatcaacaaatacatacataatttcaggcagtgttcaaagaagccatgccaaagaaataacctttactctgaattcagtgtggtctctggctaagaatatgccctggcagaagggaagccctttctattctctgaaaagaagtgtgtttaccaaagcattaaatgataaatacattttttaacggtgaagtcacaggtctcacagaaatacaaaatgaacacgtgtaaaaaatttatttactcattaacccggggaccagtaagctgttagaaccagctctaagcagaatttaaagcacccatctatattgttgaatcaggactggggaatgaatttacaaatcgatgcaaaatggcttttcccaaggaagggtaagataacaatacgaggggtcttaccgagttgtgcagagcaccacaaagaaaagcggacagcccctctagcaacagaatgcccgggacggtgtgccaaactatggctgttttttcattgaagacattcagtaattttttgtccatttcaatgtgtttcataatttctccctacaaaaaaaaatcactcatctccaaaaacccagcagctaagtagttcttctacattatcttgctttcatttatccttaatccttttgcctttggcagggttggatggtctttcttcgcccccaccaaggaggcttcggagggaaaagagggtgtaaatccaatccctccactcctccaggcaccctcccatttccgccacaggggcgaggatggctcaaggctgggcttggctctgtcccttccccgcaggccccgcccccagcccgcgcaataattgagctgcgcgcaaaggtcacgttatcagcctgtgacgcttcccatccagtacgtggcacacattgctcagaaaagccccttgtgcccgctttctgccatccgcgctgtctcgtgtctccctttttccattaaatgcctcttttcttgcgggtctcatctcgggaatagtgcactacggggacatacctatccccaactatcctaggcccgagaaccagcccttgccttcgcgtaacaggcggagactcgctgaggcgagttgcacttctaattgggcgtgaggtcttgtcaatccccaagttcttccaatcagaagtccggtccatccagccttccgctccccattggcctgtgtggaggaagaggggtgggtaagccgaagtcgctgcgctcagtgcgcaggcgcgaagaagctggcaggggcacgagccgggggcgggtttgaagacgcgtcgttgggttttggaggccgtgaaacagccgtttgagtttggctgcgggtggagaacgtttgtcaggggcccggccaagaaggaggcccgcctgttacgatggtgtccatgagtttcaagcggaaccgcagtgaccggttctacagcacccggtgctgcggctgttgccatgtccgcaccgggacgatcatcctggggacctggtacatggtaaggcgggcaggcgtggcgcgtatgtccggggggcctggggagcggggcctggtgcggagggggtgagactggaaacggggtgttgggtggggcggggacttggaggggcgctgctttttaaggcgcgccaactctggatgaagtccaaggactttgggaaagtaaccttgttcaggaatcggagtcgggggagcggggggcggtggtaagcatggggagattgttctttggcaagaatttgaggagagaagcgggcttgggagagcagaggctttgcaggcgaagggacgagggtggtaggatttggtgggaattcctctgttttggttcttgttgtatttctacgatctgaaaggcagcatctcccttcctcctatccagtgctccctggaattttttcctctaatgaaataattaggagcggaccttggtaaacgcagtctagtttcgacattggtcttcccgttgggaaagcgaaagatccagcggtaacccggttgtccgcgtttcttggactttgttttgtttcatgcctctcttgcatctccagaatcgcttgggggcgatagcttttgcctgagttgacgcctgaccagcttttgtcctggtgcagcctcctccctgcgcagtaggtgcttttcgtagccgaccggctgtttttacagagacctttattgagagccctctccatcctggccacctaccccggtatctcctgggttccaagatctgtgtgattctgtcctaaccaagttgacactgttgttgcctggtgattcactagtaataagtttgtgattttttcttttgtaattcaccatttatagtatccatgcacattaaacctaacttgtctatgacttccaaatatgggattcagtttaggtagttttaggttattatgattttgccgaagccgtgacaaacttcctacatggtcgacttggccactttaatgacttcgcgaatgtggttgtgtgggtgacgttggtgatactgtgcagtttttgatacttaactgcaaaagaggaagagagttatcccagacacaatctgttttctctgtacttgctgcttctccccactcattgacttgaaatcattagtaagcatttggacaaacgccagatgagaatcatcttaaatgaggcagatactgtttcatggcccacccccgggggactacctgactccacatgactgctacctgccctgttgttttttaccgtcttgtttctgatgtacatttaaaaaacaacacgaatgtgtaggtttgcttgtgctgagtttattttcatgtttcctgtacttttatattcggaaataccgccttattgacagaactatatcacattttccctcagagactctttcgttctgtattttaactgatttggaatactaaacatagagttaatgaccatcagctgcattatgtttctaacttccttttatagcttctccattttgctgaggggctgggtctcatttcttttgtttgtccttagctctgtcttctatttccctaaatgaataattcaaaccttgaggatcctcaaggctattactcaattccgtcttcctcacccccagaagatgactttctttcctatttaactaagagaatccatcggcctggctctctcctgcagtcttagtcttcctgtttcttctcagatccttccctccactcacagaacaaaggattcctaactcctcaagaagagaataccaccatttctatttcaaccatccgaatgtaattggctgtatttcttttcagtttttctcaggcagattttttgatgctgtgggctcagctagaaaatgaatagaatagcaggataaagtgggaactacaaacaggaaactcaaaatgcagagagaaaaacttcattacgggcgcttattcttacaaaatagggagtgaggagtttacatctgttccctactttaagcccttgttgtgagaagggttcacatacctctgaagaccatgctttagtttcacaattttaaaaagatgccatagctgttcttactttgcatagacttctcagattagtgtaaaacattttattgtaaacttcttaaatcgtttgacctgtcttaaattgattaagagatttactgaccacctgcagtgtaaaaggctttggtggacaaacaaaaggaataaatcacaggggccatgtgtcatttgccttgttttcctattacctgctaagtgctagactctcaaatgtttcttgtctaacacagcatctgcccttaagatatttatggtatcacaaacttggagcacagatatgaaaaacatatggtacagtgatgaggaggaggagaaggtgatcagtaatatcagattctaatcagaataagtactggaaaaaggccattggttttgtttattatagttttgttgatgactttcaaaagagtagcttgaataccatagcagtgtaaagacagtctctaccaacttggggagacatgtaacacttatgatgcaagaccacctaagccaaactgtagtataatacttcgaagcaaagaaggcttgtccaagtagtgcattttattctcagaagctgctttactaagacagagaaacaatatggggatgagtgagtattaaatgtcacttccctccctacctaccttgtcaaggtactctcttgcttgattcctggtgaggcaataattcagtctgcatgggagaatatttatgtttctttttacattacgtgggacagacttctgagatgatgattccccctgtgtcatttggaacttgggggagcccctctccctcgctatcagtgactgtatctgatacagtctcattgctttctagccacggcttctactggtctagtgttaaagtatcgtaacaccatatactaaaatattcattgtatggtacaaaatagtgctgtgggacatagagaaagccagaaccagttattatatgcaccggaggtaccagccctgaagtgtgagcctttcgtattttagctagaaaagaagcatacctggttaagtaacaggaaatttcagaatgagctcatgtttaaattctggcattcctgaaatggttttctctatcatttattgaagaatttgaagccagttgattttaaacaagtttcttatgaggtataaactcaaatgtttattgaataattgaaaatggacttaaaagtgtgctgtagtagatatactttgtgattaatggtgtgcactacaagactacattttgagcatttgtaataattttatctcttagacttaatatatggctaatttttcatgagtgtctcaaccataaacagtttgaagttctgtatctgggagagaagtaaaaacaggtttccttaagctctattcctttctagccctcacctctgacttcaagtaagcatagcttgtttatatttgttagtttccttccttaaactaaggaagttttgtgcctctgcctttgcatatgctattccttctccctgaaatgttgctgtcctcccaagtcactttctaaaaattttattaaggaaattttcatacatacaaaagtagtgaagtagtacgaaaacctcccatttattcatcacccagcttcaaccattaacaacattttgccaagtccagataatttaatggttagctcacatgttttcgtggtaaaactttcctttttttttttttttgagacggagtctcgctctgtcgcccaggccggactgcggaccgcagtggcgcaatctcggctcactgcaagctccgcttcccgggttcacgccattctcctgcctcagcctcccgagtagctgggactacaggcgcccgccaccgcgcccggctaattttttatatttttagtagagacggggtttcaccttgttagccaggatggtctctatctcctgacctcatgatccacccgcctcggcctcccaaagtgctgggattacaggcgtgagccaccgcgcccggcctttttttttttttttcttttttgagacagagtcttgctctgtcaccaggctggagtgcagtggtgcgatctcggctcactgcaacctccgcctcccaggttcaagcgattcctctgccccagcctcccaaatagctgggactacaggcacccgccaccatgtcgggctaattttttgtattttagtagagacggggtttcaccgtgttggccgggattgtctcgatctcctgacctcatgatctgcctgccttggcctcccaaagtgctgggattacaggcgtgagctaccatgcccagccaagctttctttacttcctagccagggggatctgtttttctcacggtgcacctgcaaaagtttctggatccttcttgtatgtacttattaaatagtactcagtacacattggtaggattgtccttttctcttatttttctctctacagcaagatgttctcctggagggaagagggtgatgtctttataagggcagtggctcacgcctgtaatcccagcattttgggaggccaaggcaggtggattgcccaggagttcgagaccagcctgagcaacatgacgaaaccccctctctaccaaaaaaaaatatatattatattatatatatatttatatattatattatatatatatttatataatatatatttatatatagatatataatatataaatatatataaaacatataaaaatatatatacacacacacatacatacatatatatattagcggggcatggtgtggtggtgcatgcctgtagtcccagctacaggggaggctgaagtgggaggatcacttgagccggggaggcagaggttgcagtgagcctagatcgcagtaactactctccatcctgggtgacagaatgagaccctgtctcaaaataaaatgtgtgtgatggctaacttattaattaaaacatttgaggtgttcattacacatttgttgaatgaatgtctcctccaaaaaatattgtgaatactcagttgtatctgcatgtaacagtaaacaacaacaaaaaactttttttttttaaattatactgtaagttctagggtacatgtccacagcgtgcaggtttgttgcataggtatacatgtgccatgttggtttgctgcacccatcaactcatcatttacattagttatttctcctaatgctatccctcccccagcccgccacccgctgacaggccctggtgtaggtgtgtgatgttccccaccctgtgtccaagtgttctcattgttcagttcccacctatgagtgagaacatgcggtgtttggttttctgtccttgtaatagtttgctgagaatgatggtttccagcttcatccatgtccctgcaaaggacatgaactaatccttttttatggctaaaaaacgttttaaagatagtcaattttgatctttatcagataacaggctttgcttagttctgtagattgaccctcctgtgggtgctttctctgcatgggaagcccttatctggatgcctccttaaaccagacacactgttttaattattatctcagtagatactggctctgggcaaattactgtgggaaaactgaaaaatgattttttttttaaagtctccagagaatcttctggaataggtgtggcagtgaaagaagaaaacaaagaattcctctcttcaggccctgtgcttccatggatctgatacagttattttgtaacaagtcaaatctaacagatttcttattgtacacacttacataagatgtagaagctttcaaaaacaatgcacaccacctgatttgactgattaaatttacagtactgttaacacattgagtggtgaatccgcagcccatgctgctaaaatattgctgcattctatacctctccatattgccaagtttagaagttaataatttaatcttttttttttttttttaaagagatggggtcttgctatgttgcctgtgctggtgtgcaatggcatgattatagcacactgcagccttgaactgggctcaaacaatcctcccacctcaggcacctgaccagctgggactacaggcacacaccactgtccccagcttaatcattctttttaaattacatttttattaactttctttcctgaatacagtgaaaggaaaaagtgaatcaggaataaatatttgtaatagttagtacatagttggatattttcagagaaattttgtattgtaagattacagttaattttatgtattttttgaaaagctaaacatgtaatttagaaatatcaactttaatcagagataagttgccagggcttacatgtgagcacaaggtaggcgttcgttggtgaatatctttaagatcaaaggatgccaggagcggtggctcgtgcctgtcatcctagcactttaggaggccaatgcagtaggatcacttgaggccaggagttcaagaccagactggacaacatagtgagactccatctctacaaaaaaaatttttttaagtcacaaggatgggttttccagtgtaatactttaagatgtaagttggggttctaatgaaatgatgtgatctaatggaatataattaactcaaagaagatttggaaaaagcttttaatgaagtagcattgaaatttatttcactgtttcttggtccttctgattggccctacgatttattttgtttaatatttagtggtatgacccacagtgaaattaaacttgaagtgtctctagtactaaaagaagataatagtggatgagcgtgtgacttatccatggaagagaagaaaagtgaagagttcttttgttttttaagagacagacttagtattgttgcctaggctggtctccagagctcaggcgatccttcccacctcagcctcccaagtagctgggactataggtgtgagatttttagaaatccttcatgtaataaaaatatttaagaagggaaaatagaactcctaaatgtttttggcatgtcattcccttcatttagtaattgggtttgcatgcttttcttgacaaaggaatttctgtaccgcagagagctttttcactgtgactatgctgtgtttagcaaagaagagtttgcctaattgatttcaaactgatttccatacacagaacatataacgttttagtagatatatctgatagttcagtaattaattcacctagttgtattagctcatactcatacaccacacacgctggccaaaacccattgcagcaaatgtgggcaacaaaaaaaatcagctttcaactggggagagccaccttgcaaaagtgattgttcctggtaagtcctctcaagaattgaaagatatcatgccttgcctctgaacaatgcaaggaaagaggcttgctgctgaacatagacagtaaagtctaaacattttatagccttagataatggtttctttgggaaagaccttaaaataggagttactggggaatgtttattaataatcacgtagtgctgagaaggaggatgtcttaaaaaccagacttgtgtcctgattctcccatctgtcagctcagcaagcttaacacaagttatatagctttactgaatcttaagtttccccatctacacataggctttggtaatacttacttcacgggttgttgtgaggaataagtgaagtaatacacgtaaatacacatgtcataaagcatatcctcaataaatattggttgattccaaatttcatattgtggcattgtttagatcacctaccctaaaataaaacttgatctgcttatctagcggatgttagtgaaatgacttcagctgataaaaggaaaatgcatttcctgtgtgtttatcattcaaggtgaaacaggagagaagtatataatagtttgtttaaaatactatcgatagctggccgacacagtggctcacacctgtaatcccagcactttgggaggccaaggctggtggatcacttgaggtcaggagtttgagaccagcctggccaacgtggcgaaaccccacctctactaaaaatacaaaaattagccaggcttgaatggtgcacgcctgtagtcccagctactcgggaggctgaggtgtgagaatggcctgaacccaagaggtggaagctgcagtaagccgagatcgtgccactgcactccagcctgggtgacagagcgaggcttggtctcaaaaaaaaaaaaaaaaaaaaaggtcccagctacttgggaggctgaggtgtgagaattgcttgaacccaagaggtggaagctgcagtgagctgagattgcgccactgcactccagcttgggtgacagagcaaggcttggtctcaaaaaaaaaaaaagtcccagctaccccggggactgaggcaggagaatcgcttgaacccaggaggtggaggctgcagtgagccgagattgcgctactgcactccagcctgggcgacagagcgagactccatctcaaaaactaaataaattaaaatactactgataggaacttaacccttgaaaattccagatgttcacattttcacaaagggaaggagggcaaattctgtgaactttactatgctagataaggaagcctaactccaatcctacgtgagatttctgtcttgagtcgttaacaatactctttctgagtacttaaatgcagtgaagcctcctgggataccacagggattggccaacaactacaggcacaactcatttccttttaaaatggatttacaaccctgggagactaggaaaattcagatattataatgggatttcagcaggctgttcctctaaagagctaaacaattttattcagaagttgctagttaatgggaaggggcagcctctggcagctttgtcctcacctctgttctcttttgttagtaacttagatggaaatactgattacatgctgatcctaaattcaggaagttgagacagtaaatctgtagtgtgtcagaatccacatccagaaaatcttcataggcaagaatgtaataagatgaaactcaattacaggtatattaaggcctatgcttgggcctctgaatccaactgtacaggtgggagcttagcacaatcaagtgtgaaaaagaacttggtgttttagggagttactctcatgtgatattcagaaaatttgtaaagccaatgcaggctgggtgcggtggctcatgcctgtaatcacagcatgttgggaggctaaagcaggaggatcacttgaggccaagagttcaagaccagcctaggcaatatggtgagaccttgtttctaacaaaaacaaaaaacctcagtacaacttcaggttgcattaattgaaattcgttagccagaatatgagaactgagatcccattatgttctgaccagggtgactttacctcattttaatatatgtccatcaaactggagcatgtgtaaagaggaagacaaaagggaaataggtagctaggaaacatgctagtcagaggaatggcttaaagatctgcatgtctattctagagaacacagtatttggaggctgttttcaggtattggagcacttatttagaagggagagcacattatctcaaaaggtagatttaaggccgggcgtggtggctcacgcctgtaataccaacactttgggaggctagggctgggtgtatcacttgaggtcaggaattagagaccagcctggccaacatagtgaaaccccgtctctactaaaaatacaaaaatcacccgcgtatggtcgtgggcacctgtaatcccagctaccaggtggctgaggtgggaggatcacatgagcctaggaaggggaggcttcagtgagctgagattgcaccactgcactccaccctgggcaatagagtgagactccatatcacacacacgcacacatacacatacacacacacacacaaaagtaagactagtagataagtgactttcagtatcttggtaagtctcttaagcatttgagtctagctctagaggaaatagtgagttctctgtcacctgatgagagatgctgtggaggggtttcgggcatctgatgaataaatataacagatgaacagtaacttcttcaaatccagaaattctgagattggtatatgaataaataggtagcttcgaacatgaaccatttgtaatgattctttagttttaatttttttctggtgtattggttaagcatcttatctctcaaatggttaatattacttatactttataaaatatttatttttaaattattctcatagtggtaattgcgtattgttttatctcacaggtagtctcccactattttatatctttgttacttcaagtaagacaatcttaaatatgagaggacatctagagattgtgctaagattgcgtcgtgatggtaattaatgtaactgatagaatgttatcttttccaggtagtaaacctattgatggcaattttgctgactgtggaagtgactcatccaaactccatgccagctgtcaacattcagtatgaagtcatcggtaattactattcgtctgagagaatggctggtatgtgtttaatagaaaaacaaaaaaatctcccctgctaatttttatatacagtcctgtgttgtttaatgatggggacacattctgagaaatgtcactgggtgatattgttgtgtgaacatcatagggtgtacttacacaaacctagatagcgtagcctactatacacctaggcgatgtggtagagactcctaggctaaaacctgtacagcaggttactgtaccgaatactgtaggcagttatcatacagtggcaaataggtgtgtatctaaagatggaaaaatatagtaatactgtaaatacactattacagtgttatggaaccctcatgatatatgcagtccattgttgaccaaaatgttgttggcccatgtctgtctgtctccacacacactggttatttaggggattgattagattatgcttaagttacatttcagaaagttaaaatggttacataataagggtaacaagttaaattatatttaagtcattcttgctgaggcaggaaagtattttgatgggtttttcagagagattcagtgaggattacaatagagcatttctagccagaaaatgtaatggactattaagtttttgagaaatgtgtaaaatgtaccttgaaatcaaaataagcatgcaggcttcataagactttttttttaatgtagctactagtagaaaggagaagttgctatggttacaatatatgtgtccctccaaaattcacatgctggagcttaacctccaaggtgatgatattaagaggtaggacccttgggtggtgattaggccatgagggctctacccttatgaatgggataaatgcctttctttttttttgagacagagttttgcgcttgttgcccaggctggagtgcagtggtgcgatctcggctcagggcaacctctgcctcctgggttcaagcgattctcctgcctcagcctcctgagtagctgggattacaggcacacaccaccacacccggctaattttttgtatttttagagttactccatgttggtcaggttggtctcgaactcccgaccttaggtgatccacccgcctcagcctcccaaagtgctgggattacaggcgtgccacagcgcccagccagcgcccttcatttttaaaatcacatttatattatttatttgtttaaaaaaagttttttagagaaaaggtcttactttgttgtcccaactggagtgcagtggtacagtaatagctcactgtaacccagaattcctgagctcaagtgatcctcccacctcagctgcctgagtagctaaatttttgtggagatcgggtctccctgtctttaccaggctggtcttgagctcccggcttcaagggaccctcccacttcagcctcccaaagtgctgagattacaggcatgagccactgtgcccagcccatagcagactcttgaaagccgattatttgaattacaaattttgctttcaagtttgataatacctgtttaatttcatattttgtttttacctgaattcttctaagtggaagtttgcatgttgtagcagggaagtcctttaaattcttaacatttatcaatcctgtatcctctaagaaaaaagtaaagaggactattcctagtttagtgccaaatattgatgaggttttactgcccagtgataaattatatatacatgctgtgcatggtggctcatgcctgtaatcccatcactttgggaggccgaggcaggtgaatcacttgaggtcaggagtttgagactagcctggctaacatggtgaaatcctgtctctattaaaaatacaaaaattagctgggcttggtggcgcaggcctgcaatcctagctactctggaggctgaggcaaaagaatctcatgaacctgggaggcagaggttgcagtgagctgagattgtgccactgcactccagcctgggtgacagtgagattgtctcaaagaaaaaaaaaaagttgtatatacatttacccaatagggaatattcagcagttgttctagtcattcatcattattagtgccctcagtattttttttcttttttcatttttaaaacatcttttgtgcatacagggtcttgctatattgcccaggttggtcttgaactcctggcctcaagtaattttcccaccttagtctctcagagtactgagattacaggtgtgggttgccgtgcccatcccccccagtttcttaatctctgcccagacggatcacctgatgttgggagtttagaccagcctggccaacatggtgaaacctcgtctctactagaaatacagaaattagctggatgtggtggtgcttgcctataattccagctacttgggaggctgaggcaagagaatcacatgaacctgggaggtagaggttgcagtgagccgagatcgcgccactgcactctagcctgggcgacagagcaagactctgtctcaggaaaagaaagaaaaaactgtccagagtcacagaatcaactacagatttgtgctaagaaattcagtaagtcaggcacggtttagaattgcttgagattacttggctgttttgtgaaaaaattagtgatcatggattaatggagagttggaacaacctgaggaagagttgagaaacgaagaagaaagtagtgtgtgttaacatagataccagggtgcaggaagcaatgaattttggtgtttgggaggttgggtggggaagtgaggttaatggcgaaatttgaatttcaggttatatttatctagagcaaagggtaatgtatgtagcattctgagtttaatacacttgtcttttaagcaattgccagccattccttccagctaaaccctactcataagacccatcttgtgtcatttcttcatattttttcctgatgcttcaggcaaagcaaattgtttctgcctctgttgtagcacttgacacattggattataatgatctgtttgcacatcttcagattcctgggctcataagggcacagggacctgtttctctagcagagaatgtggttcatgtgccatcctacacccatgtcagtgagtcgttggagcgatttaacaaataagtgctttgtgtgaatgtctcaaggttccttacttcatgctgagactttgattttttttttttttttttaccctcttggccttagatctttttatagccaattttgaaaatatttaaatttaatattttaaagctagctttaagtgaagttttgttctttttgttgtgtaagtagcttaattagatttttgtttttgttttcttagataatgcctgtgttctttttgccgtctctgttcttatgtttataatcagttcaatgctggtttatggagcaatttctgtaagtatactgtattttcatcttttagagtttgaccttaggggagcttagtaatttcctatatgtgatacaatgttatggttgttattttttctccagtatcaagtgggttggctgattccattcttctgttaccgactttttgacttcgtcctcagttgcctggttgctattagttctctcacctatttgccaagaatcaaagaatatctggatcaactagtaagtgtgtatgctcattaaacttatttttttttcattttgagtaaaatgtttacatttaaattctgaatcagccttaggtattatttttaactactccgcttgcttttgaaagtgtcttaaaataattatttctgctctcttagctactgtgacaaaactggcaagatgaaagtagagtaatttcttaccatccatttggataatgcagtattaagagttcctagaaatggatattatggaactagtagttcagcttttgtttttgagcatccaaaggtacagtaatttgactgtgtatggcactctttaagtgactagcttattgtctttacagacatctgtagcaagtattccagtgcctactatgtttttagccctttgctaggcactgttggtgaatggtgtggatataaagataactgcgaatattacagtttagcgagcaaactgtaatatttggggagtcaagatacatgaagatgttacctgtgataacaagcgggagctgtcacagcagcagcaaataaggaacttcgattaatgtcatatggaggggggcagggaaaactctgggctgggtggccaaggagggcgtcgtggaggtggtcagaaggagatatgggatctaggtagatgaaaattggcaggagtatcctcagttcatttccaaagtgctgtctttcagaacttttcttcccactaccagatttcctgcctagcccattttccacaccaccaaattcgtcattcatttattcagaaaacattcgctggttgctcttatgtgcaaggcactctgctaggtcatagagatgcatcagtggagcttacttcctggtgaaggaatcaggaagttgacagttaactgatacaccattgtaggttactgtgggagtggatatcacatgggtactaaacctgggctgggaagtgagatttgaattgtactcaggagtttgaacaggaattaagatagagaaagtatagaagacaatgttccagataaaagagagaccttgaggcaagaagcagcatagtgagggcactagaagctggccatggtggctggcacacagagggagggtggggaagcctggagaaaggtggccaggggcagggcctgttggcctggtcagccacggtcagcggcttctgtgtggctctctgctcatgtcatctccgggggagaaatttcaagtggtgcctccctgccttctgagtaaaacccttagcatagcattccctcatgagctccaccttctgtgtttttctttttgtttatagatgaagatcaaaaaaacagcttttttcccaaggagacaacctggctggggtttggggagtagtgtgttcttaaaattttttttttctatttttttcagtcctttgggatttctgtttatgttgctttttaaatgaaaatgtaattaggccttcttgttgacatttccattaaaaacaagcataacttaaaaaaattaaatcagctttatagaaaagaagataaaaatttattattccttttagagaccctggtgttttctctcctctgttttgttcacttagtgcctcagactggaaggtatttcctctgttggttagtttttaaatctgaaattcttcttttataacacctttctccctgaacttagctcattgccttgtacacagtcagggctgaataagtatttaaatgaatatagctgatgcttttcagtagaacagagtatgtctgcagtaaaacttatgtcttgcctgacattgtaaccagtgggtgtatttttgcccctgtctgatgagagttgagacaaacgattgacatttagaaaaataattttccccttgtagcattaaaatggcccagtttatctgtagaacttacacagaactgagcatctcctgagttaatgatgcaagtgacacagggactgatctccagtgccatataggcgatagtgtttttccaaaggccagaaagatggaaaatagtgaaaagtaaagagaaaacgagctaaatttagactttttggagcattgtgggttatcaaatgtactctaagtgattgttagcatgcattaatggtgataaggcttaaaatttaaaagcactttgaattaaattctgcttatacatttttattaaatatcacttttgactttggtgcctttgtattcttcagatgctcttcaggttatcagcaagtgctagtgcgatggctgacttgtaaatgtgtgtgtgtttctttaatagcctgattttccctacaaagatgacctcctggccttggactccagctgcctcctgttcattgttcttgtgttctttgccttattcatcatttttaaggtacgttgctgactaaatctttaggggtgactgagattgacactgtgaatctaaacctttttgctgcctttcaccttacaagtcacaggagattgaggatttgtggggacagtgtttattctggcacatgagcagagatagcttctagggaatggtttctgttgtgtttccaaggaatggttgtaactgtcaggatccttctctaagtgaaaggacctactttttatgtttttgaaaaggggttcatgatttgtattgaaaatctgttaaaattcccaaggttcacaaacccagaatttcttctgcagcacagtgggttgacctgaattgaagctccatctctggtttctctctgaaatgttggcgatgaaactcatgacacttaaatgagagcaagtagggaaagggcctggcctgtgctgggtccacacagaggtcagctcccttctacacagaggatgtgtggggaaagcattctaagtcactggcattttagagcaggtagtctgttgagtttctagcagatgtcaactttgtttttattcttccaggcttatctaattaactgtgtttggaactgctataaatacatcaacaaccgaaacgtgccggagattgctgtgtaccctgcctttgaagcacctcctcaggttagctactgttggatagagtaaaaggtcaccagtcactattgactgttccaggagaagaacctggagcttgactttctctttcatgctgtaacctatggtttgggcatgaaccctgggtacttttatgaacagcttaaaatccacaggattcaacattttccacttggaatcctgagtacctgggtcgcttgtctcatccagtttggctgttagatttactcattagaggtcctcattagtgtcatgtttgtaggggagatgacaggaaacagctgtgttaggcccatgtagcctggggcttctaaggatggggagttccattgactgaaacttgtgttgttttcagaaaacatccatatgatccaacgggggagctgacctgtctggggagatgaatacagtggtttcatgggtcttttggggaagcctacctttcacagccctctaattgctgctgtgctaccttcccaggttttcagcatataaaatatatgtggcccatctagggccaggctttcagacttggagtcacttcgattagaatgtcactcctccactgcataggtgtgcctgttaccctcgaagacatgatataagttcatgatcttctgactacaaactgattctgatgaaagtcaggatccaggagctagcgtcttattgggtgtttcctattgcatggtttaacccaactcctcaacacctgaagtgtaattggcactggcacttcatcggtcacactggaatgagggcagagcaatggcacccactgcctgcctgtctaggaatccttgtccagaagcaggactctctctccccacctccctctctccaccctccccttcgctagcaatcttggtaaaattccaggttattgaggcatctacttgggaacattttagctaacagtttcttcagctcttctttatggttttgtatgaccctatttagggcataaagtctgaaagctgaattatctcacaaaggattttaaaggagaattaaatctgatacaattttttttctctctttagtacgttttgccaacctatgaaatggccgtgaaaatgcctgaaaaagaaccaccacctccttacttacctgcctgaagaaattctgcctttgacaataaatcctataccagctttttgtttgtttatgttacagaatgctgcaattcagggctcttcaaacttgtttgatataaaatatgttgtcttttgtttaagcatttattttcaaacactaaggagctttttgacatctgttaaacgtctttttgtttttttgttaagtcttttacattttaatagtttttgaagacaatctaggttaagcaagagcaaagtgccattgtttgcctttaattggggggtgggaagggaaagagggtacttgccacatagtttcctttttaactgcactttctttatataatcgtttgcattttgttacttgctaccctgagtactttcaggaagactgacttaaatattcggggtgagtaagtagttgggtataagatctgaacttttcatctgcagaggcaagaaaaatatttgacattgtgacttgactgtggaagatgatggttgcatgtttctagtttgtatatgtttccatctttgtgataagatgatttaataaatctctttaaatacttagggttgtcattgtttttaatccgttacttttttttaagataaaccctgacattttccattacagtgtattcagagtgccagtgtttattttttttttaactttgagaatacagttggcccttcatatccatgggttctgtatccatgggttctatatccatggagttaatcgactgtggattgaaaatatttggggggaaaaatggatagttggatctgtactgaacatgtacagactttttattcttgtcgttgttctctaaaaaatacactataacaatttatgtagcattcacattatattagatattataagtaatctagagatcattttaaaaatatgggaggatatgcatgggtcatatgcaaatactataccattttattataagggacttgagcaactgtggatttgggtatctggagggagaacctgcaaccagtcccccatagataccaagggacaactgcacaatgatgcacagttaattagaaatcattttcttaatccattaactctaaatttgtggtgaagatatttcttgaatcacaggacagaaattaataccggtggtttgaaaagtgattgctgtagcaatcttttttttatgtcttattttttttctttccaacttcttaggttcagagggtacatgtgcaggtttgtaacatgggtaaattgtgttgcaggggttttgtcagtgttttgtcatccaggttgtgagcatagtacctgatagctagttttttgatcctcaccctctactctcaggtaggccctggtatctattactcccttctttgtgtccatgtgtacttaatgtttagctcccacttataagtgagagtatttggatttctgttcttgcattaatttgcctaggataacggcctccagctccatccatgctcctgcagaggacatgatcttgttcttttttatgactgtagtattccataatatatatgtaccacattttcattatccagtccactgttgatgggtatttaggttgattccatgcttttgctattgtgaatagtgctgtgatgaacatatgtatacatgtgtctttttgggagaataatttatattcctttaggtatatacctgataataggattgctgggttgaatggtagaatgttttaagtttgagaaatcccttatgctgctttacacagagatggaactaatttgcattcccaccaacagtgtgtaagtgttcccttttctctgcaaccttgccagcatatgtttctttttactttttaatcatagctgttctgactggggtgagatggatttctctgattattagcatttctctaatggttagtgatgttgagcattttttcatttacttattggccatgtgtatgtcttttgagaagtgtctgttcatgtcctttaccaatttttttttttttttttttgagacagggtcctcgctctgtcacctaggctggagtgcagtggcacgatcttggctctctgcaacctccacctcctgggttcaagcgattctcatgactcagcctcctgtgtagctgggactacaggtgtgtgccaccacacccggctaattttcgtatttttagtagagatggggtttcaccatgttagctaggctggtctcgaactcctgacctcaagtgttccaccttcctcagcctcccaaagtgctgagattacagctgtgagccactacacccagcctcctttgcccacttttaatgttgttgttgttgttgttgttttgttttttgcttaagttccttgtagattctgaatattagacctttgtcatatccatagtttgcaaatattttcttccattctgtaggttgtctggttgctctgttgatagtttctttagctgagcagagaagctctttagtttaattaggtcccatttgtcaatttttgtttttgttgcagttgcttttggtgtcttcctcatgaaatctttgccagggcctacatccagaatggtatttcttaggtgtccttctaggggttttgtttgttttgttttttcagttaggttttacatgtaagtcttgatatgggtttggatttgtgtccccatccgaatcttatgttgaattgtaatccccagcattggaggtggtgcctggtgggaggtgattggatcatgggggtggtttctcgtggtttaacatcatccttcttgctgctgttctcgtgatagtgagttattgcgacatctgtgtgtgtagcacctcccccttctctctcttgctcccgctcctgccatgtaagatgcttggctccccctttgccttctgccacgactgaaagctccctgatgcctccccagaagctgatgctgccatgcttcctgtacagcctgtggagtgagccagttaaacctctgttctttataaattattcagtctcagctatttctttatagcagtgcaagaacagactaatagaagtctttaatccatcttaagttatttttatatatggtgaaggtgtctagttctaatctgcatttggctaaccagttatcccagcaccatttattgaatagtcctttccccattacttatttttgtcaactttattgaagatcagatggctgtagtttgtatggctttatttctgggttctgtatttggttccattggtctgtctgtttttgtaccagtaccatgctgttttgattactgtagtcttgtagtatagtttgaagttggataatgtgatgccttcagctttgttctttctgcttaggattgccttggctattcaggctttttttggttccatatgaattttgaaatagttttttctaattctgtgaaaatgccattggtagtttaataggaatagcattgaatctgtaaactgctttgggcagtatggccattttaacaatattgattcttcctatctgtgagcatggaatctttttccatttgtttatgtcgtctctgatttctgtcagcagtgttttgtaattctcattatagagatctttcaccttcctggttagctgtattcctagctacttaagtcttttgtggctattgtgaatgggattgcattcttgatttgactctcagcttgggtattattgttgtatagaaatgctactgatttttgtgtattgattttatatcctgagactgctgaagtttatatctaggagctttgaggcagagactatggggttttctaagtttagaatcacattttctgtgaaaagagatattttgacttcctctcttcctatttggatgctttttatttttttcgcttgcctgattgttctcactaggacttccagtactgtgttgaataggagtggggagagtgggcatccttgtcttgttccagttctcaagcagaatgcttccagcttttgccaattcagtgtaatgttggctgtggatttgtcatagataattcttattgttttgaggttacgttcctttgatgcctcatagttttttaagggtttttgccatgaagggatgttgaattttattgaaagcattttctgtgtctatcgagatgatcatgtggttttgtttttagttctatttatgtgatgaattacatgcattgatttccatatattgaaccaaccttggatcctaggaataaagcccacttgatcacagtgggttggctttttgatgtgttgctgggttttggttcataaaaggcagttcccctgcacacactgttgcctattacccagttccaaagtcgattccacattttcaggtctccttatttatgttcttcagggatattggcctgaagttttctttttttttgttgtgtctctgccaggttttggtatgagaatgatgctggcctcataggatgagttagggaggaattctcctcaagtttttggaatagtttctgtaggattggtaccagctctttatatgtctggtagaatttggctgtgaatctgtttgggaccttttccagttggtaggagtattattattactgattcaatttcagaactcaggctggatacagtggctcatgcatgtaatcccagcactttgggaggccaaggcgggtggattgcttgaggccaggagttcgagacctgcctggacaatatggtaaaaccctgtctctactaaaaatacaaggtcagtgtgaaagaaaaaatattaaaagcagctagagagaaggggcaggtcagctacatcaggttaacagcagatctttcagcagaaaccctacaagccagaagagattggggacctatattcagcattcttaaaaattccaaccaagaatttcatatccagccaaactaagcttcataatcaaaaaagaaataaaatccttttcagtacctaggatgcaagtccactacagctcgtgtgtcctgtgtccctgctaaggaacaagttggagatgaggacctcttactctcttttcccatctatatttggcacagtgacccacaaaaagctgagggggagggaattaaatgttttctgaatgaaataatttctctcccctccacaaattttatactgctaatagatcattttcaatataattgggaatataccagtacacatactacacttacatttaaagtttctggcaataggaaaccaagagatctttcactgataagttgtacattttattccctctggtgactcacgctgtttttcagtctgtggctaatttgttcacagttatcgtggacttagctttgttctgagcctaattgttccactatcccttaataggcaaaggatagatgtgctattttcagaactcctgctttcaaagaaggaatgtgttataaataagcccaagagttgactgaaagaaaaagttgtacctttgcttttctgaggttgctttttctgtaaatgtcatgactttggttatgagaaaataatttagaaacaagatgagtgttgccaaataatgtggaattccaggcacacgagagaggcaacactgggatggtggaatgaacacaaagtttggcatcagaaggttgaaattcaattcctgtcttcacccagcgattacactctgaccctgggaaatttaactaggatctgagcttcagtttttgcatctataaaatcagaaagatgcaaataactgacctatgaacttggagttgttcttaggatcaagtgaggtaacagacccggaagggttggcagaccataaatcactgtgcaaatattatgagggtgtatgagagcaaggaatggctggaggaagggctggagagggagaaaagtatttgacctggaaaccagaaaaagagtgactttgttccctgtctgttagaaaggagctttgtacagtagtccccccttatgtgtgggggatataccctaagaaccccagtgggtgcctgaaaccatggatagtaacagtaccctctatatactatgctttttcctataatacatacctatgataaagtttaatttataaattagagtaagagattaaaagcaataactaataaaatagaacaactacaatttttttaggttttttttattattattatactttaagttttagggtacatgtgcacaatgtgcaggttagttacatatgtatacatgtgccatgctggtgtgctgcacccattaactcgtcatttagcattaggtatatctcccaatgctatccctcctcgctccccccaccccacaacagtccccagagagtgattttccccttcctgtgtccatgtgttctcattgttcaattcccacctatgagtgagaacatgcggtgtttggttttttgtccttgcgatagtttgctgagaatggtgatttccaatttcatccatgtccctacaaaggacatgaactcatccttttttatggctgcatagtatcccatgatgtatatgtgccacattttcttaatccagtctatcattgttggacatttgggttggtaccaagtctttgctattgtgaatagtgccacaataaacatacgtgtgcatgtgtctttatagcagcatgatttatagtcctttgggtatatatccagtaatgggatggctgggtcaaatggtatttctagttctagatccttgaggaatcgccacactgacttccacaatggttgaactagtttacactcccaccaacagtgtaaaagtgttcctatttctccacatcctctccagcacctgttgtttcttggctttttaatgatcaccattctaactggtgtgagatggtatctcattgtggttttgatttgcatttctctgatggccagtgatggtgagcattttttcatgtgttttttggctgcataaatgtcttcttttgagaagtgtccgttcatgtccttggcccactttttgatggggttgtttttttcttgtaaatttgtttgagttcatcgtagattctggatattagccctttgtcagatgagtaggttgcgaaaattttctcccattttgtaggttgccttttcactctgatggtagttttttttgctgtgcagaagctctttagtttaattagatcccatttgtcaattttggcttttgttgccactgcttttggtgttttagacatgaagtccttgcccatgcctatgtcctgaatggtaatgcctaggttttcttctagggtttttatggttttaggtctaacatgtaagtctttaatccatcttgaattaatttttgtataaggtgtaaagaagggatccagtttcagctttctacatatggctagccagttttcccagcaccatttattaaatagagaatcctttccccattgcttgtttttctcaggtttgtcaaagatcagatagttgtagatatgcggcgttatttctgagggctctgttctgtagaacaactacaatttaataaaagttatctgaatgtggtttccctctctgtatctctctcaaaacatcttatactgtacctacctttcttcttgtgatctgttgatctgataaccaagatgattacgaagtgcccaataggtgggtaatacatgcaggcagcgtggatgcactggacaaaggagtgagtcatgtccagggcagtacagagcaggacagtgtgagagtttatcatgctactcagaatggcatgcaatttaaaacttataaattatttttttaaagcctatggattatttacttctggaattttccatttagtatttttggactgtagtcccccacagataactgaaactttgaaaagtaaaaccacagataaccggggactagtatatctgttatcatttggttaggttgcatcagagaacttgatttatattcctggccctcccaccaattatatgaattcagtaagtaattcagattgcaaatgagattgtacattccttcttcctctgaccgtctgtgactcacttttggttaaacagttaattatcttttattattattttttagagacagggtctttatcacccaggctgtagtgcaatggtgcaattatagctcactgcaccctcaatttcctgtcctcaagcaatcctccctccttggtctcccaaagtgctgagattacaagtgtgagccaccacatccagccagttcatgatcttttaaagataaaaagataatttaaaaaactacataggtaccctcttagttaccatttttggtgttcttcattcccttgtgtagatacatatttccatctggtataatttttcttctttcagaaagactttaacattttttacagtgtggttctgctggtgataagttcttttgggttttgtatatctaaaaatatttttactcactttgggaggttaaggcgggcagatcatgaggtcaggagtttgagaccagactgaccaacatagtgaaaccccatctctactaaaaatacaaaaagtagccgggcatggtggtgcgggcctgtaatcccagctactcaggaggctgaggcaggagaattgcttgaacccaggaggcggaggttgcagtgagccaagatcgctccactgcactccagcctgggcaacagagcaagacaccatctcaaaaaaaaaaaaaattacctttgtttttcaaaagctatcttccctggatgtagaattctaagtggacctttttttggtttatttttgttttttttctttcagcactttaaagatattgcttcactgtcttcttgaacacattgtttctaatgagaaatttactgtcatccttgactttctctgtatggaacattttttttctttgggtaatgaacattttctcttatagccctgattttgaacaatttgtttatgatgttcctcgatgctggctttttgttttttcacatttgttgcatttgaggttcattgagattcttaaatctgtaggtttatagatttcatcatgtttggaaaaatttcagtcattatctcttcaaatattttctctgtcctctcttctccctccttcagggatcctgtctggctggaaaagggaagataagcttcctacagtgagcagatttgagataggtcttgagagttggttaggacttgaactggtagagatgtcaatcaaagacttcgcaacttaatatgaaaggatcaagagaggaaggaggtcatcaagatttctttcatgcctgtctggccagaggaatagtggaataaatggggaataaaggacagtgagcttttttaaaaaagaggaagatgagttcattcttggttatgattgagcatgacgtacttttgtgacctttaaatagaggagtacaaaagcgagttacaaatgtagttttattgctcaggagtaggttgggacaagagactctgatctggaaattagcaatatagaggtggtagctgaaacaacgctggtagttgagactcctaacatagatggtacacaaagtatcaagacctagtcatttcagcccttccatttctagtaatttcttctagggagataatagtaattcacaaagattcatgaaaaaaggttcagtgaagcacagcttgcaattaaaaacaagtagaaactacatgtcccacaatggaaaattggttaagtaaatgaaatatacagtgaaatacagtacagtcattacaaatgttgtatttgaagaatataacagaaaagtgttcactatatgttaagtacagaaagcaagttataaccctacaacatagcatggtctcatttttaataaaaatggatgcatatataagcagagacaaaagaggtaacaccacatagcttatctttgggtggtagtctatggatggtctttccattcttttgcttatctacagtttctacattctgtatagtaaagtatatgttacttttatactaagaaaaaaatcgattttcctttttaaaagctgatttagaaaaaagcctgtggacttccacacttcatagagcatggaaagaagaaaaggaagtggcaaatgagagagacagtgtagaatcaggactataggacaacctgggatgaaggggctaacactggagctcctgccaaaaacagggtgatctaaactctaccaagaggcctctgggcttggtgatctgagccattatgcacttaggagagcactttccttaggatagtgcaggggaggaaggaagagcactttccccaggatggtacaggggaggcagtaagaaatgggttaagaagtgatagctgttgagaagtgtggtgtggagagaaggaggtgggaggatagtcactcattggccccagatgtttcatgaccccagatccagatgctcagcaagtcccattcataacaaagacatggggccactgtgcagtttccttgctggtggccatttccttgcacctgctcttactgcagatacaggcctgttgccaagatcattcgaatgagatactacaaactgcaggacacaaactccctcggcatagcagttgcctcctgatatggtttggctgtgtccccacacaaatctcacc

SEQ ID NO: 3112 - DNA, 1538 bp, Homo sapiens
caactatcctaggcccgagaaccagcccttgccttcgcgtaacaggcggagactcgctgaggcgagttgcacttctaattgggcgtgaggtcttgtcaatccccaagttcttccaatcagaagtccggtccatccagccttccgctccccattggcctgtgtggaggaagaggggtgggtaagccgaagtcgctgcgctcagtgcgcaggcgcgaagaagctggcaggggcacgagccgggggcgggtttgaagacgcgtcgttgggttttggaggccgtgaaacagccgtttgagtttggctgcgggtggagaacgtttgtcaggggcccggccaagaaggaggcccgcctgttacgatggtgtccatgagtttcaagcggaaccgcagtgaccggttctacagcacccggtgctgcggctgttgccatgtccgcaccgggacgatcatcctggggacctggtacatggtagtaaacctattgatggcaattttgctgactgtggaagtgactcatccaaactccatgccagctgtcaacattcagtatgaagtcatcggtaattactattcgtctgagagaatggctgtatcaagtgggttggctgattccattcttctgttaccgactttttgacttcgtcctcagttgcctggttgctattagttctctcacctatttgccaagaatcaaagaatatctggatcaactacctgattttccctacaaagatgacctcctggccttggactccagctgcctcctgttcattgttcttgtgttctttgccttattcatcatttttaaggcttatctaattaactgtgtttggaactgctataaatacatcaacaaccgaaacgtgccggagattgctgtgtaccctgcctttgaagcacctcctcagtacgttttgccaacctatgaaatggccgtgaaaatgcctgaaaaagaaccaccacctccttacttacctgcctgaagaaattctgcctttgacaataaatcctataccagctttttgtttgtttatgttacagaatgctgcaattcagggctcttcaaacttgtttgatataaaatatgttgtcttttgtttaagcatttattttcaaacactaaggagctttttgacatctgttaaacgtctttttgtttttttgttaagtcttttacattttaatagtttttgaagacaatctaggttaagcaagagcaaagtgccattgtttgcctttaattggggggtgggaagggaaagagggtacttgccacatagtttcctttttaactgcactttctttatataatcgtttgcattttgttacttgctaccctgagtactttcaggaagactgacttaaatattcggggtgagtaagtagttgggtataagatctgaacttttcatctgcagaggcaagaaaaatatttgacattgtgacttgactgtggaagatgatggttgcatgtttctagtttgtatatgtttccatctttgtgataagatgatttaataaatctctttaaatactta

SEQ ID NO: 3113 - protein, 144 aa, Homo sapiens
MKSSVITIRLREWLYQVGWLIPFFCYRLFDFVLSCLVAISSLTYLPRIKEYLDQLPDFPYKDDLLALDSSCLLFIVLVFFALFIIFKAYLINCVWNCYKYINNRNVPEIAVYPAFEAPPQYVLPTYEMAVKMPEKEPPPPYLPA

SEQ ID NO: 3114 - DNA, 1615 bp, Homo sapiens
caactatcctaggcccgagaaccagcccttgccttcgcgtaacaggcggagactcgctgaggcgagttgcacttctaattgggcgtgaggtcttgtcaatccccaagttcttccaatcagaagtccggtccatccagccttccgctccccattggcctgtgtggaggaagaggggtgggtaagccgaagtcgctgcgctcagtgcgcaggcgcgaagaagctggcaggggcacgagccgggggcgggtttgaagacgcgtcgttgggttttggaggccgtgaaacagccgtttgagtttggctgcgggtggagaacgtttgtcaggggcccggccaagaaggaggcccgcctgttacgatggtgtccatgagtttcaagcggaaccgcagtgaccggttctacagcacccggtgctgcggctgttgccatgtccgcaccgggacgatcatcctggggacctggtacatggtagtaaacctattgatggcaattttgctgactgtggaagtgactcatccaaactccatgccagctgtcaacattcagtatgaagtcatcggtaattactattcgtctgagagaatggctgataatgcctgtgttctttttgccgtctctgttcttatgtttataatcagttcaatgctggtttatggagcaatttcttatcaagtgggttggctgattccattcttctgttaccgactttttgacttcgtcctcagttgcctggttgctattagttctctcacctatttgccaagaatcaaagaatatctggatcaactacctgattttccctacaaagatgacctcctggccttggactccagctgcctcctgttcattgttcttgtgttctttgccttattcatcatttttaaggcttatctaattaactgtgtttggaactgctataaatacatcaacaaccgaaacgtgccggagattgctgtgtaccctgcctttgaagcacctcctcagtacgttttgccaacctatgaaatggccgtgaaaatgcctgaaaaagaaccaccacctccttacttacctgcctgaagaaattctgcctttgacaataaatcctataccagctttttgtttgtttatgttacagaatgctgcaattcagggctcttcaaacttgtttgatataaaatatgttgtcttttgtttaagcatttattttcaaacactaaggagctttttgacatctgttaaacgtctttttgtttttttgttaagtcttttacattttaatagtttttgaagacaatctaggttaagcaagagcaaagtgccattgtttgcctttaattggggggtgggaagggaaagagggtacttgccacatagtttcctttttaactgcactttctttatataatcgtttgcattttgttacttgctaccctgagtactttcaggaagactgacttaaatattcggggtgagtaagtagttgggtataagatctgaacttttcatctgcagaggcaagaaaaatatttgacattgtgacttgactgtggaagatgatggttgcatgtttctagtttgtatatgtttccatctttgtgataagatgatttaataaatctctttaaatactta

SEQ ID NO: 3115 - protein, 231 aa, Homo sapiens
MVSMSFKRNRSDRFYSTRCCGCCHVRTGTIILGTWYMVVNLLMAILLTVEVTHPNSMPAVNIQYEVIGNYYSSMADNACVLFAVSVLMFIISSMLVYGAISYQVGWLIPFFCYRLFDFVLSCLVAISSLTYLPRIKEYLDQLPDFPYKDDLLALDSSCLLFIVLVFFALFIIFKAYLINCVWNCYKYINNRNVPEIAVYPAFEAPPQYVLPTYEMAVKMPEKEPPPPYLPA

SEQ ID NO: 3116 - DNA, 1458 bp, Homo sapiens
caactatcctaggcccgagaaccagcccttgccttcgcgtaacaggcggagactcgctgaggcgagttgcacttctaattgggcgtgaggtcttgtcaatccccaagttcttccaatcagaagtccggtccatccagccttccgctccccattggcctgtgtggaggaagaggggtgggtaagccgaagtcgctgcgctcagtgcgcaggcgcgaagaagctggcaggggcacgagccgggggcgggtttgaagacgcgtcgttgggttttggaggccgtgaaacagccgtttgagtttggctgcgggtggagaacgtttgtcaggggcccggccaagaaggaggcccgcctgttacgatggtgtccatgagtttcaagcggaaccgcagtgaccggttctacagcacccggtgctgcggctgttgccatgtccgcaccgggacgatcatcctggggacctggtacatggtagtaaacctattgatggcaattttgctgactgtggaagtgactcatccaaactccatgccagctgtcaacattcagtatgaagtcatcggtaattactattcgtctgagagaatggctgataatgcctgtgttctttttgccgtctctgttcttatgtttataatcagttcaatgctggtttatggagcaatttcttatcaagtgggttggctgattccattcttctgttaccgactttttgacttcgtcctcagttgcctggttgctattagttctctcacctatttgccaagaatcaaagaatatctggatcaactacctgattttccctacaaagatgacctcctggccttggactccagctgcctcctgttcattgttcttgtgttctttgccttattcatcatttttaaggcttatctaattaactgtgtttggaactgctataaatacatcaacaaccgaaacgtgccggagattgctgtgtaccctgcctttgaagcacctcctcagtacgttttgccaacctatgaaatggccgtgaaaatgcctgaaaaagaaccaccacctccttacttacctgcctgaagaaattctgcctttgacaataaatcctataccagctttttgtttgtttatgttacagaatgctgcaattcagggctcttcaaacttgtttgatataaaatctgttaaacgtctttttgtttttttgttaagtcttttacattttaatagtttttgaagacaatctaggttaagcaagagcaaagtgccattgtttgcctttaattggggggtgggaagggaaagagggtaccaggaagactgacttaaatattcggggtgagtaagtagttgggtataagatctgaacttttcatctgcagaggcaagaaaaatatttgacattgtgacttgactgtggaagatgatggttgcatgtttctagtttgtatatgtttccatctttgtgataagatgat

SEQ ID NO: 3117 - protein, 231 aa, Homo sapiens; identical to SEQ ID NO: 3115

SEQ ID NO: 3118 - DNA, 131171 bp, Mus musculus
  misc_feature (1)...(131171): n = A, C, G, or T/U
acatggtgactcacaatgatcccagggaatctgatactccttctggcctccttgcacactgcacacttgtggtgcataaatacatattcagactatatatatgtgtgtgtgtgtatatatatatatatatatatatatatacatatatatatatatatatatatatacagaaatgttggtatagacagaaggatagagaagatgaatctgttgaggaatagcaacaacattcaaattctatttgaatggaagcaaatactttgcatccattagtaagtaaagaaagtcagtaaagaaacattaagaataagattatagaacattatggaactgtttcatccatgcaataggatactatatggtaatcatccatgtttatttgggactacttagaagatgcaaatgaaagattgctagcagcttcgtcagaccaacagtctcttcctagtgagaaataggaaaaggccagggtggggatgggggctcaattgcttagtaaagttgacagtaatgacagctctaaagagcgacagaggcagagaaatgaagtcctctcgtgctcacctgtaaagaactgaagattaactttagaagtttaggagcatcagggttgccagttgatcattaatattccttgatttaatgagaaactgaagcacatgctacacaatgctaatattcagggtgataggagcacgggtgtctcttagattcatctttgtctaaatactccttgcaaaagggaaagtacctctcgttcattactctttagcatgagttagactatcaatctatcagatcaagacaaagagagaaaatgggatgtgtgctaaaatacaaacctcagtaacttgaaagcgtcatatctttttcaaaacatattataataagcctattaaaatatgccagatgtggtggccactatctaaatctcttcttgttttcatcccttcaaatgacaaatattccgaaaatcttttgtaaactgacatcctgatgtacttgatgtttttcctaacttctctgcttttgttcattctatcagtcttccttaacttacacataaaaaaaaaataaataaataaagcttgtttcaaacatcagtgtttcttgtttgtttgtttgtttgtttttgttggcaagaaataagggtcaaagaaagtttaaccacctgtgggaaattaacaccgagtgcttatgctactactttaacagtaaacaaagagaaaatagtctgtgtttccaaagctttcagagatgatttttcatatagctgttcacagttttcttgtctgtcactgtgtttgattctctgagtgctcctgtaagaaaagccggtcagtgtttatcacccatggtgaacaagtgagagctttgaaacgggggatggtccctgacacgccccaagtcatacaaggtcagagccgagctgttccacatctagattttaagacctgatttcctcttcctatggcaccctgcctgtttggaactggtggagcattcatcatgcatatttatcccattctggagacatgccttaattcaggcccgtgtcatagttggtgagttcttagggaattatggaggaaatttgatagtttgccaatagaaaactggcatgctagatatgccacaagctgtaaaccttcacaccagaatgagagaagatatcccttcagcattgggagagcaaaaacagcatagtttgtgctccagttctgtagtttccttgtcccaaggtcttgaaactagcttccctctccaggtctcagttgctccaaagtgtcaaatgaagacattaaatgaggctgcctccaattctgtgtctactctcaaagatagtgaaatatttaaatacgtataataaaaggcagggtcccctttccatctaggacctccctcccctccccctgcacacagattaaataaatgcactggaacctgggtaagaaagaaatgcaaatcagaaatttgcatttatgtataaaaatatgaaaatcaccagattttctaaaaatcttcccatctcttctcgtattaacagatgggacacagtttgatggagtcgatcagaggaagcagctgccatcttcgcagccacaccgcatgaatgacactaatgagacaggtgaaacttgcaagagcccaagaagtgcctcaagaaaccactgctgctctgccagggtcatagtgggcctgtttgtgggtttgtcatcagctccaaaaatagaccatgtgggtaatatttcatctaatgatgatgattgttatttatagcctgccccagcctggcaggcaagtgtcccagaagaacaaaaggatgctcaatataattaaaacaaagaaaacgtagaggtgttggcatacgagaaagggagctattcactatcagaagcagagcagtctctgttagatttgatgaattatcactaatgggatgtttattttaggatcacacaacatttgtgggcgtattgtttgatgcatacacaaaaatgcatcctaatatttctcttctggtaaaaacagaaaatgttctgcgctactcttccaggtttgcatttgtttcatatccccataaataatttgaaagcaaaatcctcctaacatagaggaatacagattaattgtatgggtgcttattaaggatacattatctttctaacattgggaatgcaaatgtggggtgtgtgtgcatgtgtgtgtgtttgtattttgcatgtgtatgatttctaaattaaaattctgtgatgtgtgctatgaattgaattggagttcaggaaagactttgttacatctcatatgaaaaggcagatgttttacaaagggaggaggctgcaaggtacaaatgcagagaggtgccatgtaatagttttcttttaagattatggagacactagagggaagaataatcatgtacagacaatcatgagttctgtcctaatgtgatgggtagccattgaaaggcttcagtaagggaactgccacaccatgcttccttaaagagcatctctggacctgtaggtggacagtgaattgaataaagaaagaatatcattgaaataccattcagaagccactaaaagtctttcatacatggcttgtggtaggttatgggaagataaaacagaagatagaggctgtggagatggctcatttgcataaggcttactgcacaagagtgaggactaagagctggaatacccagaataagatgactagtccaatttttgaggtctgggttcatgagagagatcctgtctcaaaatcaagtggggattgacagaggcagacaatacacatcaacctttttgtctacagacacattgatacacacacacaaaagataaatgtaaattgttactatattgagttccctgtaagattcaataatctaaggcattcctcacatggtgaaagagttaagagagacaaacactagaacttgaaaaatgtccaaatgactgcttacatagtgattgtcacatacagtcatatatgtgtacatatatacatgtagcatggcacacttctgtgttagaaatattgcctgacaagaagccccatgaagtcagcttaattgactgtggtaagaatcctaatgctatcttcaaacccagattgtgttttccagatgcctacatgtggcaaaatttttggtagtcagagaaaacatcttgacctatgtctgaactaaagtctatccactgttcattaatatgtctcttgggaaataaagtaactctttgtaagatggagaagaagagtaaaataagacgggagagaaggaaggaggaagaggaggagaaggaagcagaggaagataagaaggatgaggaagacagggaggaagaagaggtagatatccaatagattcaagctttagtccacaaatgtgagtcatgaaacctttgttggtctttcatgactatgattcagtttgatgacttgaataagttataccaagccttaattttctgaactataaaatgggtacagtcataagtgacccctacttatctgtttgtgatgccacacagatgatgggggtatgcctttaaaatgctccaaccctttgctcaaggtttacttagtgtgtcattactttgttggtagtgattttgaagattatgtaagcttcaggggtggtaaggttagatctcctaaagaggctgactcatttgtcaaaggcaccaaaattgatacaatcagcaattttggatttagttagctagccaagtattgaggtcaactaacctattaaaattatgagaggatttgtacttaaaggagagaagtccttgatagtagagatagtagagaaatactatttctagtatttctatctagaaatagatttaggattggaaatacagtaagagttcaaatttggtagcttgagtagcatccggcactgtgctggtactcattcatttcatggatattttctcttttgctccaatttctgttcatcataaaataggcactcattaaatgtcagttgcatacacaactctttctggccagtgctacgattaacactttctcaggtttggtacaaggctatggaaagagagaagaatgctcatgccccattgctgtaaggagaaagaagactgcctagatctgcccacaaattcagtctgtcaagcaccgaaagttttcctgacttcctggtttacaagtgttcactttctattaatactggtccatccttctcccttttaattcttgggctatatgattttctctgttactgacaatcactttactatgcttacacaacacctaagttattgaccccacttttcttttatgggtggatggatagatggatggatggatgggtggatggatggatgggtgggtggatggcgcctacatctatatgcctggctgtgtgccagatgaggggtttactccagagtgctccttatattcagagtttagagatctagtaaaaccaaactgagtcttggacagccctctgaaacaatcagacatattttttacagctttattcatagatgtatacattttggcaaacatctaaaagaagaaagtagtgagactgcaatgaattgtccacttacttcattgccatttgctgaatgttacctttttatgtattgggtattctttggggtgcttggaattataatactgataaagcataaatcgtggcctctcaaagcccatgatttggttgacaggcatatgtaggttgcttattatttaagaactccataattttgaatgtattctgttgttgaaacttatttttacataagtgcagggggccttgaatggcctttggtttggtgacttagtctctgggagctcccagaggtccaaattagtttatgctgttggtttgccttgtctggactcagtcaaagaagatgcatctaatcctgtagagacttgatgccctaaggaagggaaatgcccagggtgggggggatggcaccctctcagaggcagaggcaaaggggaggaggagagaggaagaactctgtgaggaggtactggaaaggggaccaacattggggttgtaaataaataaaatcatcaacttttttttaaaaaaaaatgtatttttaaagccaaacgatcatggagcatgcctctaatcccagaacttgagaggcagaggcagatgatctctgagtttgaggccagcctggtctacagaatgagttccaggacagacaggactacacagagaaacctctgacttaaaaacaaaacaaaacaaaacaaaacaaaacaaaacaaacaaacaaacttatttttagtgactgaagaaatgtctcagcagttatgagcatctgacactcttacagagaacctgggtttgattctagctcccacatcaggcagcttataattgcctataacaccacctctgcgatattcattgccctcttctgaaccctgtgggcactgaacacatattgtacatattctctctctctgtctctctctctgtgtctctctctctgtgtctctgtctctctctctctctcacatccacacacacacatgcccccacacattcacacatgcacgaaataaataaatacatattaaaatctgatatctttcccccaaactaatacttattcgtgcttttgaggtttttatttactttgtctgcttgtttgtactgttttgcctcaaccaaatacttaagtcaccctaatccacatgttcctatcgaggctgaatgagatgatggccactgccttctcagctcttctgggttagcctgtgctgtaccgttctcatttctgtgcttttcgtcgacagtttcactctctaaagtggccataaagcacagagccaagtacgatacaaagtttctccaaaacaagagccaggagggctatgatgctcaacaaggagaaaataggcacatgagatctgaccagggagagtgctattggccagggttcattgccagtgaaccaaccatttatattatgtgtggtgtccttaaataggaaacatggctgtttggtgactattaggtgttgatgaaactgcatctagagacttatggccaccaaatcctatgtctcccctagaagccatagtccacagtctgtatccaacagtctcaagtgtgatgactcgatagaacacagctactgtgaataaggagaactggccatttaatcagctgatttcctaagcacagctaagtaggggtatgaatgaaatgctttggaaaaagtcctaacaggggggttgcttctgagtccagcctttaaaactataaacagatgttccatggatgatctggatggtgacaggtcattcaaggattggaggattgagtttgaagaaatttgactaggaaacaccggacaaatgagcgtctagaaaagcaatgaggccagagaactttagtcataaaccaagccacaggcaggagctttcaatcactacaaagtttctctgcatagttgaagctatagtttttgtattaaggaaatatgcagcatgtcggctgtgaaaattggctcaatattcataatcaaacctagtatgctcctgctccatgtttccgtagaaacccctagttacacaaagggaccctggccggccattggcaagaaaactcagtactgctggaggtcactataatgatgccgggggggggggggggagtacaacataattcctggtgagatcagtgagctgagacagcaaagtattgttcccttgtagcacataggacggagagtactacagcggatcaggatacagagtccctcagtctccccaccatgcccctatctatgaaagataccgcctgccagtgcatctgaacctagcacgctcttgacatacagtgcaattcagagcacacaagagagtgacattctacaccagcccttctttcatagttccaaagcggttggtatatgtgctcacatcaatctcctaactcaggcttcctaagtcccattttgtagacaatggcttcaaatgacagaataatctttttagagttcacacagcttgtcccaaggatccttaaggaatcttcaggtgtttgttgttgttgttgtttttacttgaggcttagtggggacactgtacagctcaccccacaccgggtctccactccctgctccagtgtgcacggtctgcatactgcagtacctccctcatcccgatgtgaactctgcttgtcctgtttgctgcctgttggaggctgggcatttaacaagactctcagcatttaacaagacgccctgaagcttctggtcttatggtaaatttcttctattccaggtctatgcggcaacattttaattccatcctccttcctgttccaccttgttatagcctggtctgacagaatatcaaaggcctggaacaagccctcagccatcccttggtacagttcctggaatttagttgatgtagtctatcaaaacaacaataaaacaaaacaaaaacccaccactcaaaaaggatgttcttgaatttagttgaatttagatagtaagctcagttcatgtgaaccagtatatactgtgaatgaataccacccaaaacaaagtctcaactcacctgcccctaattgacagtttaatttcactgtaatctttattatgacagcttctgaacttgtcattagcattactgataaagttgaaagactatttcatctgattattgtgtcttaagaaacacttaattattaaattccacactgataattagaaagccctattatttcgtaatggactcagcaatactacccaggtatccctcaattactgagacagaagccgcctccaagtgtgctaaagtgaactcgcacacaccaagtaatctctactcaccaacatgagctgtgttcctagagatggaaaggtctgctcagcttccaagatgatatagtattccaggtatcaatttgttatctggggctgattcattcatgacctccccaaagcctggccaaagttgaaggcagacaggataagtaaaggagaaaaggtgcaacggaggtgtgtgtgtgtgtgtgtgtgtgtgtgtgtgtgtatgtgtgtgtgtgtgtatgtgtgtgtgtgtgtgtatatgtgtgtgtgtatgtgtgtgtgtatgtgtgtgtgtgtatctatgtctgtgtatgtgtctacttgtgtatatctgtgtctgtgtgtttcagacaaacaaatcaaagctaaggtcatggcaagaaaaattctaatagagccataataacataaaataaactgtcttcagatggacaaaaaataagatgagtacaggtggggggcagggagcttgagaaacttatgcaacccaaggaccatttccatgtaggagactatattattctaactagactgtgcctgtctagatcctgtctgaattcttgccaaaactgaaccaaacactctactgctaagcagttcctgggagcctgtcagaaacgcagactatcaagagcctcaggagacttaggcggagtaaatttgtcatggggactcatactggcctcaagcaaggggatagagcaatgctctccctgaagcaccttccactgttggagccccaggcttttcctcctgttcccaacccacaaactcactacccaaagaagccatggctgtcagcacaaggcctgacacactgtgaaggtttaatactgtataaattgtataatgatcttctctggttggctgactgggaaaaagagcagccaacctaggtatctgcaaggcaaacacacatacaggggctctgactcacaacctgtttggcacagctcggtcctctgggcttccggaatctccctttctgtacaaaacctcctcggcagatgttttaaaacaatgatctgtgacaatgagagctgtaagctactttctccttacctcgcagaattttaaattcactgtttagaagaccgttgcatttcataggctaggcatcatttgggaagacattttttgggatcacattcaataacggtggcctttaaagctaggcgtgtgttactaggacaggcaagggaagtgtgagagcaagcaggttcaccatccaaagtaacctggggccagggaagggggagcactagtatcagtgtgagtgtatgccagtggcctatggagagtgtgtctttgggggtgttttgtttgtattttgtttgtctgaggggaaaagtgggtaatgaaggaatttaggcctcctagtgaatagcaagacaagtggtccaggcagagagtattaacattagctgggaggtacagtgctaactcctgggtgcagatcctagtgcctagcctggctagaagtgaaccggccctccgggtgacagcagggtgggattccaaagccagggaggggcgggcgggccgtggggcgggccgtgggcggggcggggcggggctggaagtcgactctcgggctgaggctgccgccggagaggcatccacagcagcggagcgggcggccgagcaggaacgaggcggcgacagcggctgcgactccggtgagcgtggtgcggactcggctggggcgcggcagggatcgcgggctgggactggcagggaaaggcgctgcggaggcacaagggcctcccgggcgccggatttggtggagcggggcgactgtggctctcttcgtccggctcgcgacgccctgcagccccgggcgagggagggaggcagctagctcacgactcggtcttgaactgttcttcttggttcccgaacacagaggtctgtgcgtccattgctccctctctccgggtctctctcctgattttatttcttttccagaagagtcccttcacccttcaaccactcccacccctaccgccacccccccgcccctcccccgaaccttcatctccaaagctattcttcaggagacccgcgatctacctcctccgggttcccctgccagggccatgcctctgctccccatatttctgtagccccaagcgtggatgaagcctgttctggcccctgcacacctgtacccttttgctgccacctgccacagaggtgcttagccagcaggcaaactgctgtgcctaggacctcctcgcctccgcggtattcactccccctcatgccagaactcctaactagagtccagcaggaggagacttttccaagctggagcttcgggaacaatttgacccacttcccgaggcactggtctcaggccagccatgcttttttgtagacacacctgtcttatttgccagctgagagactggcaagaacaccttttgacaaaaatgtgccagcctgtcccctattccttttccaagctgttaaacttcttggcctatgtccccagagacgaggtctagggcatttgccatttaaatctgctaaagctctcaccctcgcccccaacctacatctctgtgacgatccccagaatcctgtcagccattactggaagaggaagggtccagtactgatagaaccaccattctgagtttttctgggcatgctttctcctcctatgcgggtgattacctgcctacttcttagagaaccccaggctcatagggctcccctgaagcctagtggttttcttattagaaactttccctactctgaccaatcatcacctcttccagattgtcccatgctatctgcacagtgctgagtctccagggctcagggaaagctgggttagcaccatgcagtttgagaacctgtgcatagcagcaagaggagggtggctcctagccaggcctcagctttgggaagaccagcctgttaggattgttcccagtcagactaaatttcacacactggttgtgagggcttcgtgtgaagagaggaggcagaccaggggctgtttttcctgcctgtttctgactgtcttgtgttgctatggtgacagttttgcctcttcctccccctgactcttctgggagctggtttttattggtctgttgtcctgtcttttatggctctaatttcttctttctacttgctctgaaataaacagtcataaacatgggcactgggcccaggctgggggctggcagaattcacctcctgtgggcccctagctcctgtgaggagagaatactgaacaagcaggggtgggataaagctaccatgcactttcttgctctcaagctttgaggaggggacagtagcatcccgtttggtagcatccttctggatatgtcaaacacttgtgatagctcactggggagctagtgttctaggggaagggtagcccccatctctcactttgcatctgaggtaagtaatctcagagcaagtgagctgtttcccgtgggctcctgttgatgtgagcacacagtcagctctcagatttgatcaatgaagggtagtcacagagctgaaacatgggtctctctgcctcccatcctgctgtgctcccagatccgtctcctaaaggacttccctgcaccaggaagtaattaggaagggttcgagtcccctcaccctgcagcacatgctgcctcccatgccctctggacatcttgaaccccaagtgctggggacccaagttgagagcagagtgaagccacttgtgacttcctgtttttactcagcactgagaggaattcagtttgcttttgcttatgctcccagggcctagatgcaaccggatgactcaaggacagagagccagccctgagtaaggagttcccagagagctaacccagtccatagaatctgtcacccactgtcccctgttcgcgacagtctgcagtgaagctgctcctcccttcctggttctttttctcttccttgcattttctctctctcccctttgtatggcaaagttccggcttgttgaattagagcaacatgtacagacaagggtatcaacagcctctcggtcagctgttgacccagaggaagtcagttcactcacatggacctcattctatctttcaaatagacttgaagcatctttatctttcctgttgggtgctgcttcttcttttagagtgaaatggattagactacctgctatgatttgaatcgttggaaggctgaaagaccttaagcaccttaggttttcttgggagatcttaggttaaagagatgtctgagccactgttggcaggttgaaaattttaggattttaagtcataatcattcaagactagtggcatttttttcaagttattttgtggagtcttcatggaacacacaactttacttatacgcttcatatttatgtaccaggtacagtgcagggatctcagagacatgacaccccctcctaaaaatgtggtctggtggaaaaggaagacctggaaatagattttgtcatgcagtcagagcagtgtcttgacaaagggaaaggtggtgtggagttcagagatggctcttagtcagatcatcccttagggttgatcaggtagcctcgctttgtgactgaaatacaactaatcaactactgtcatcttgaaaggccctcatttagtcttcacagaatcgagtgattatcaaagagagcccctccttagcttctggtgagtatatcacaaagaggcagtcctgtctgcctctgggagctttgactcattcatagtagcctctggttcctgcttaaccttggttaaaaatcccctctatggtgccacaataattgcaaggctaggtcttaaagtgactggaaagagagaagatgatggaatcaggcatgaacttaagctctgctgtagtgttttctggctgtggggtcctgaaagtctacctgagctcactgagtctccattcttgtagcagtaaaattccaatacttacccttgtcttcttccagattaaatggtcttatgtatttatagggcctggcatggtgccaatctcacaatagacttgctcttatttactcgtattgattagagaagagttctcctgttaaggggcttctgggtcctctcagaatccccaaggagggctctctggatgaatcctggcccttggagatccattcattatctaggaaggttaaaaaattgcccgcagtcagactcctagctttactggttactcttctagttatctctcaccagataagccagcttctccaccactagagcaagtgccagtctctcacactttttgaagtggaaatgcacttccagagttgcaggaatgcagtttcccccctgtgagaatcctttaaaataaatgtttactcataaagaaaatcctggacctgtttagctgccccccgcccacttgtttttaaatttatgtttatacatttgcttgtctctattctagatttaaagaaatgaggacagggaggtaaaatcgcatcagctagtaagtggcagggccagaattgaaaacgaggtcctgcgtactctttgtgccatggcatacagtcttgtcattttcttggctggtatgtcagagaaccaaaataagtgtgtttggagaatacaagtggattttagtaagggtggaactggtcactgctgtagtaactcagactcatagtaaatatttagagagcttattagggttttgctctcagtgcagcattaacaaggctttctgcatctggctgcaggatttctttttacaagtgatgaatagatggacactctgacacgtcttagtcaagaaagaatagttgatgaaattctaagtggttttttaatttttaaaaaaaattttttgcacaaagaatgaattgttggtttgtcaataatataacccaaatcactgggcaggtcagggttttatcattgaacatgtgaatggaaaatatcacaagtgtttccctgatatgtagacatagtgacaagagatagaacagcgttggaacggttgaggacaggcattgggtagggagcttttcaaagacaatggtggtgtggatttagtaggctaaatttacagcttgtgtctaggaaggtgaggatgtgaagtggtgtgagctttcttccctagccttccctaggtaaggtagaagccagcatttccttaagagtcctgctgcttcgagtgctgaggacagggaccacacttcccagcagtgtgcttatcaggtccagctgagcactgcacacagatgtggtgctatttgcaattatctcagggcctgagtctggtgtctgcttatttaatgacttcactttctaataaaaattctgtatggcatagataattagatttttaaaatgaaactgggaaagagagtgccccaaagagtttaattgcagttttatgatggatcaagcataaaaatgggatcattcatttatataaccaatgcttaccatgtgggctctttcccttggtctgtgctgggttaagagcctaggcatcagtgtggtatcatcctgccctcaagtagtccccactccaaacgtgaagcgaaggaggaagcacctacctaggtatgaccagagtcatataacagtgagctagaggaggaggtaacacgacacagcagagtccattctcctttgccagcaaggtatcatctcagggcatctcagttccctcttgaatgctaaaacagaaaaaagtgtgtgcccagaacaactgtgttcaacttttgatgcccaggctaacttccaggggaagggaggagcaagcccctgggctcctgcttccctgtctatagaacaggaaggatttgatgacttggaaggacttatccatgcctagtctgatggtattcaaaacccttcggtttctcttacccagtggtcagggaagaaggtgccctggaagctttagtgagccagcttgttgagagatctgaggagactcaagggtacttcctgggaatcctcttagagacctgctccctcccagaaagggagccattttctgattgagcacccccctccccccccccgacacacacacacgcacacacactcccaaatggttgaaagtcgaagcagatgagagcagaagatgaaggaaggtcactggagtggagcagagctaataccacattcccgaacttccatgaaggtgagtggagaaggggctggtctcccacattcaccacctacagtcatcttctgctctgagttgatgtccttaaaaccttttctgggggcgtgggggagcttgtgttactttttaaaaactaaattaaaatgcacacaaggagctatgaacaatacactcattgcagggccttcagttctttccaggtcatgggcaatgaggtcctagtccatgcaggagcagtgatgcagctaaatacaagtgagccagagtgaggaggcagcatcccatgcacagggccatggatgcagagtcagacaacaccatggatcttatgcccccagtcgactcgctcatgtgcaacctgggctttgacaagttgtctctttttaaatttaatttaatatttgagccttctgcatactttggtgctatgtgggctgcagcattgatggaacaatagaagatcttgtcagcaagataataccaagcatttgaaaaccatctggggcaaagttctgaaggacatgtgcagcagatattagctctgccttgtggctggggaagctgacatccagaggtatttttaggaacttccataatgttgcttcactaggaagatggccaagatggcgtttgctcctatgtaaaatgcctttgagagccattttctctccatcacccatactgtaaataagagagcgcgcatatgtgaggaatgtggtactcatactcatctcaaaaaggtagcacctctgtactaggcacctccactctttaaaactgaaataaaccgagtcaaatcaagcttgtgtttgaagtttctccctgcagctgactggtgtctttcagggtatcctttgctctgactaccttgtttaaggatgctatccgataggaatgagctgagcttgatctcagtcctattgagcgatgggtccctcccaactgaggcaggtgctgtgcaaggtctttttcatactcctccctgggacagctggcgacccaggaaatacaatagaactatggtctcagcttacagaatgacagagtcagttgtacaagaatacccttggtgtctttatcctagtttgaggggggtatggatggatgggtggttggattgatggatggatggaagagagatgttacaataggaaagatgcagaggagaaagaagaaatgaaggtaaaaaagagaagagagatgagtatgagagggggagggaaagaaggagggaatgtgatatatgtatatatctctatatagatatagatagatagatacagagagagacagagagaaagatagagacagacagacagacagattcactccacaattctgaaatctagagtaatgacatgtacctgggagtctgagcttctttgaagcaaacagatgagttggaatctttgcatttcccttggtcaagtccctggagcttgtgaagttttcctgtttgtacatggtaggtgatgatgtttgtgtatcatgggtactatgaggggtatgtggattaaatatttatcaggtactctttttgcttgggttttaaatagaatcttggtttgaaaagtttgggccactcttgtgggttcctctttggtattccgatgagagctgccacaaaagttccccctttcctttgacaacccatctctgaatctccccctgaaaagtcccatcctacaggctcccatcactagcctgtgagctgtccctccatagcacacacacaaaataaccttcctttagtattgctgggtcctaataaggaaaaccaagaatcagtctgtgcatgtctgttatcaatctccttgctcatttccttatttttcaaacatcttttttttccctagtgtgttgagattttaaagctgggctctttaatacctccccaagaaataaatagggtcaaaatcaatcttctgacatatccacatcttcttattgttgagtccaaaatttaaaaaagctctatcactattttggaactaaaagctagcccaattttatgggaggctatttatgactcttataggtctcatttgggataaatgagattttcagcagatagatgagtgcttcagaccctcctgggggagcacataagaggtaagtatgtactttgttcctttctgaagtatggagaacactgaatttagaggcacgttagttctgagaaaatcgttccagtgaggacagatgggctctagttgcaaatgtctacaggagttcacagtatccctagggttaggaaaaaccagcagctggttttatctctggagagaggacggctcactggttatgctattggcatgtcatgtgggaagaggatcatctcggaataaagaacctcagttgagaaaatgcctcatttagatttgcaggtaggcaaatccgaaggacatttccccaattaatgattgacatgggaaggcctacttcctgtgtgcagtgccaccccagggcaggtggttctgagtggtacaagagagcaagctgaacagcctaggaaggcatgtgcctctgtagtttctgctccaggtcctgactcccgtgttcttgccttgagtctctgcccctgacttccctcaatgattggctatgattggaaccctttcccccgcatagcaggtagtgcccatagctgctttaggtcatggtgtttattgcagcaatagaaagcaaactagaacagatggaatagccacatagttcactccattctaatcagaagtcccaaaggccactttcctaccttttcactttagaatgtattatgtgaccacattgttaagaggagagcacaaccaacgatttgttccaacatggcttccaaaagtttcaaaaggacaaggcagttttccaagcagaagtttcttagaagtagaaaggagtgggaattttgttgtctttttttttaaccaagtgtggcattaggggaagacagaagggactttttctgtctgactcatcatcattttagccttgtgaggaggaaccaggcttgaagagggagcatggggaagtgagaagccccaagcagagcgtgagaaggtcttggctctcagttagggcttgctcttgacttactgagtgaccttggactcgttacttcctttctctcttcctaggagccaagtttaagtaaatgccctttatctttctttgagcctgggtctggatgccaaggccccaaaggataagagtgagcagggagacacagtaattgccttctagtggactcttcctgtggcttctgttcaacccatgcagacttggagacacaagaaggcctctcagagctttacatctttcctttagttgctgctttcctgatgcactttgtccccagaaccttcactgtcgtccctatggacagtacttgttggctgatggactgaccaagaagatggtaaccacagccccaatatggccattgtcaatggttgcatggctctctataataacaagctgagaacacactggggattgcggtggcaaagaaggctggaacagttccctcttggggagtagaggaccaaggttaggtctactgaggaaaatgaaagggtgcagagtccagtgttaaagtccacattttgtggatcaggtacttaaataggtacatttaggcaaagagcttatataaccaatgcccaagtgacccttgatcctttgtctccttctcttttgagtttatgcttagtgtgtgtcatcattctgactttaccccgttggaagctgacttattccaggatccattaggtatgacaagttgtagttcgacattctttagggatcatctggaggaggttcttcctcggccagaactgtgacaggatcagtgcttttaacctaacaggcagtttccacagtgtggggtctgggaccttcaaagcctctgacacagactctttgagtttgtggaactataaataaggcagagcacactctaaaatattggactttatctgttccagaagcttctctgtgtatgtgtatatttacttatttagtgtgagtgtgtttctcatataaagtgagtttacttattatttacatatttggtatgagggaaagtatgttactcatatgcaagtctatttattatttacttatttagtgtctgtgtgtgtgtgtgtgtgttgtgtacatgcatgttggcatacacatgcaggctcacctgccaggatacttgggtgttgaagttaaggggaacctgtgggaattcattctctctcttcaccatatacgttccagggatcaaccttaggccattaagctgaacagcaagagccttaacccactggacacactcaccatgcctgttgtgttcatatagtagggcgtatgtgggaggtgtgtaagtgtgtagaaagtgtgtgcttgagagtaggccaaaggtgtagaacgagtatgtgtgtactgtaatgtgcatgtacatagtttgtgagtgtttgtgtgtaatccgcatggtttgtgtgagacagcatattgttttgctacatgctttgtgtttgtgcaaactgcgagtgtatatgccctatactaggtgtgtgaatatatgagagagaatggatatatatgagagagatggatgtgctgcatggatgtgctttgtctgtgctgggtgtgaaccagcgtgcatattgggttgtgtgtggatgcccatgctgggggcatttgtgtgttctttcagatctagggcagtgttgtttcatgcagggccttcccaggtttcacagacatggctttggctcaagccaatccttgcctttgtgtggctcatgaaagaaactggcttctcaagagctcccatagctcaagctgagggaccttctaggacattttaggcaccagtgaccacaggaaaatgcaaagctgaaactaagtggcagaatgcaagtcaatcatgcctcctagggacagtgtctaagccttctgcttcagagacagacccttgtcaaaattcattcttgtatatataaaatacatatctatttaattcaaagcatttgagtatggctttgaaaaaaaagaaagaaacttgaatacaggtttcaaaagtataggagactaaacatatatttcattttgcttaacatggtccgttgctagaagtgggaaagatggggaaagaggagaagctgttgggttgcctctgccctatgtagctaggacttgctctgtctttgcttcctgtgtcttctcacaggtcaaatcagctggggagtgagaggtagcagagtctgggactagctgtgaaagagagggaacagaagcaaagataacgcagagctgcacagttctgcctcctgagctgacggcgattagggagaggttgtggccacaggaaagcttggttctgagcctggttctgcagccgatctggtacagcctgggaggtccatcttcctttctgagcctcacctcttccacctctaattcgagagcttaatcaggtgtcccttgaagctggactgggagacagacctgaccctgcacaccagtcccagaggcttttgaggcaggtgggtgggaggcagatctgttttcagcccgaggttattgtggagagcctcagtgtgtaaaatggaaattggggttccctctaagtgtgaatgtggggatggatatgaatataccaataaggataccagattatatacatagcgcttgcttgctccccactttaaccctctgtgtgctggagcccttccctggacaccacttccctcttttctcctctattcccctcttctcttttcctcttacctttcttatccacagtgtacctactggcacttactaataaggtagtgagttttgcaaatttctctgtcaaacctcaaattcagcagctagtttgaatagcgcgtataaactaagacacctgcagggggcttcctatcacatgtgatgcatgtgagggtcttcttttttctaaccaataacttttaggttacctaaacccaagttgacccctaagttttcaaagaatcctcaaaccttctactgtattaattaaaatgagttatgttcttcggcaaatgtttagccatcaataatgagcattgattatcttgctggcagtcttttttatatacttctcagccaacagattctggcaaggcacatctttattcctccttcaagacatggtgacaaagaatgcatttttccctgaaattgcatgaagatagaagactcaaagtgggcagcataagtggggtgcagtctgtctgtctctgaatgatgtctgcattcccataccacacagcccatgatggttctaggtcacagggttttgtttgttttctttctttctttctttctttctttctttctttctttctttctttctttctttctttcttttttttttttttcaggagaagacattctcactttctgctttctgtccatagctagtctcttaaccttcagaaaatacaacccccagattgatttctttgcctttttcccaaatggagtttcatgccccctcccgaccttaatgaatgtaaatttcatgcaaatagtatcttctgtttgccacgtgcttccaaagtgccagacgctgctctggaaactttcacatgtgtcaggtgacaggagagggtgctgagtgcttgctacgtcggagcaaagcttagatgcagtgttgccttattcctcccctcccccaacccccccaaggcagactgcataggaaaggcatggcttgctttctgcaggagccattcacagagcgcagttcagagaatatttggtattttgccctgtactggagtttagacatccttattactgccctggatcaggtcctgatgactctttagctcccaccgtcactgtagtcactgtactgggcttccccagtttctttctgtggttaaaactcaggcccttggcttggagaaagaggccttttggcctctctcatgttacatcagcccacactgtggttggcatgatttttactgttggaaaatcctttttttagtgttatggctcaaatagacttgcatatattttgtattagcttcatattacaagagaaagagatggaatatgattttcctcaaatcatacacgagttgcatcccctttccaaggtgctgtctgtacttcagcagattcttagggactcatttataatagacccttcctcttttccctaccaaattcatccatcgattcatccatccacatgtttaatgggtatttattgagtagctataatcaggtacttttcttgaggggcagtttaccagtgacccagacagataaaactccctggcttcacagatttgattatattccgatggagaaagatgggccatgacacataagcaagtaaagtaagataagaaaataccacgaagtaaagtggctctcagatgattctagagcattggtcctcatcctgcaaccctttacagtgcctcatgctgtggtgaccccaaaccattaaaattactctcgttacttacttcataatcacaattttgctactgttatgaatcgtaatataaatatctgatatgcaacccctgtgaaaaagaatcatttgtccccaaaggggtcccgacccacaggttgagaatcactggtgtagagggtgaggcttatctgagaggaagtgtagtcactattttgagcaagatggtcagggaaggcctcaccataaggtggggactatgaagacctgaaggaagtgagaaagtgagtctcctattcatagtcagggggaaccattgtccatgataaagcccagcaaacacccaagcagggatgaagtgttcctggccagatagcaagcacagctgagggaacttggtgggtttcaggtgatgaggttgccggccagcctggggttttagtaccttctgcctccctctgactgagactgtagacatctgatttagtgttaactggtttgtctgactctagactgtgcacctcagaaggcaagcctgggctggtttgtaaccacatctctagctcacttctggaggcctggggcaggaagaaagttttctgatctctctctctctctctctctctctctctctctctctctctccctccctccctccctccctctctctcttgctctctctctctcccttcctccctccctctttctttctttctttctttctttctttctttctttctttctttctttctttctttctctctttcaaaaaccaacaacaaaaagtcctagttgaagatgattcggaacatgggagttctgtggtgtgctgtctccacactgcacttcgctagatttttgctaaaaagccatcggacagaatggctgtacaatgaatgaggtgccaggaaaagctggaagtgaaagcagtggagggaagagcgttaactggagtgctgaggatgaagaagagccccagggattaacagtacaggaggtccctgctggggactggtgttttataaagtgtaactgcaggcctggagctagaaaactctgcagaaactcttaagtgtgttaggatttcatccaggattcccattcaccactgggatgactcacaggtagcagggaagaccattcaaggaaggaaaacttttctcaggcgataggacccttcttctctcagagcagagagatagtgctgaagaggcttccgnnnnnnnnnnnnnnnnnnnnaaaaataaaagagatcttgtagaagcctgggttggttacataaggcctggcctcagggagactgaattctgtgccccaactgttatgataagttgtttggattttctgattcggatacacattgcaagtttttgaagtaaagatgttaagaagacaaaacaaaacaaaataaaaatcaactccaccaccaagaaaatgttttggttacctgatactaaaggatacaaaatcaattcgtgtctgtcagtgatgtttcatgggcttccctgtcctcatggtccaatggggttgatctctgtcctgctctcctccctctggagggtattttacagtaacaaagaagctttgacccagattaaagttctgcccaaatcacatgcctaccagaggcctctgttcaccatgtgatgcctgggttgaggtgaagtcttaacatttgttcagaactcaatttgtgtcaactttgctcctcttggtatgtctccagttgactgtttgggctttcgtccagccttcagaactacttttcctgatttgtattagtatttggtctctgtagttgagtgtaatgctttaataacatacacatggggacacttagctgactaccaggaggtgattttttttttttagttgctattgtggtaacgaggtggtaggggtcggagggggttgggggtgtcaatgcccagaggagggagtcctagtacttaatggaaacatcatttgtgggcaaaaagggagggtggtgtcaaaattcaacctagcctgggttaacattggaaaccagtgatgtgaactgtggtgggaaaccacatgtaagttgccagtgctcccagaaatagctgccgagaaccaagctggctatcaaagggctaagaatgcctttcccatctgcctgcagtattggtaagcatggggccagggtaaagtgtgactaaattgatgatcaagcagactcatccacccctgttgaatagactttttttttttaatcgaaagtaaaagggaaaggagaatagcgagagagaaaaaaacaaaaacgaacagtaagttttgaagcaacaataggaacaaggacattgcattagtcactggagttagactgagcctgtgaacttctgtcgtgagtaaataactcctgaggaggcacagaggtcagtgctctttctgtcctgctgaaatcacacaccctctgttagcattccccattctcattccaggcgtgtagagagcattctgggaatttctgtcgaggagtcttaagaccactccccatcctgagctcagggagacttcccaggccagagaggagcctctctgacccacttccctcctctgagtgtgatcacatggcacactggggggaggggggggagctgaggagctggcccatcgtggttggcgggatcaggagcactgtactctggttccggtctctttccatgcatgcttcttgttcacttgctagatcacctctgatactgggaactgtccccgagacaaatgaaacctttagggttttctagagttttaattatctgtagtttggaggggcttttctctcacccgggtaggaaagcctttcattgcacgtggttattaaaatgtgcactggtttgtttatccccctttcctgtttgatttaccttcttacggactctcagttcatagggacattactcacagaatggacttagttctcttatatgatccactataatggtcataagcacaaaactagttggaaaaaactgttgtatatcagtcagttttgctgacgtaagggggtcctcgtcccagtagttaaaagcaacaagtatcccctttgccacatttcagaggatttaagtaggcttctgtggttctttccacatttcttattatatctatgaccagattttttttttttaatgtgccaggttaacattaggaacacgagggtgaggaaggcagcataaactcgaggagcctgcagaggcttctgctgagatgcaatgttctctatgccgttcacattcccctagttaagcaagacaagtgaccaagtattctatcagctgataccctcccatggaagaggaggtggcacatgcaaggcacacggcagccagtgaggctgtgtgatcctttggagttggagaaatagaatagactagcctccacatggtaaacctcttacataagagatgaacagtgtcgtcttagtaagacagtacttggtggaatccaaggaatgaagtatctatctgacgtcaatgtttttgagggaaatatctggactaggaaatctccatgacagaggaaactgtgctttgcattattaagtcttaggggccagccctgtattctgcctgctaaatagtaggtggtcaagacatacatgttgttctcaataaaaccatgagatcacagctgccccaatattctagaaacccaagaaaatcaaacacagctgttcctctatatctaaagattcacagtctgtagatcccgcttgccataagtggaaagcgtttgaaaatagcttgcggggctggtgagatggctcagtgggtaagagcacccgaatgctcttccgaaggtccagagttcaaatcccggcaaccacatggtggctcacaaccatctgcaacaagatctgactccctcttctggagtgtctgaagacagctacagtgtacttacatatattaataaataaatctttaaaaaaaaaaagtaaaagttgtttcaaaacctagtgtgttagtacaaaaaaaaaatctttaaaaaaaaaaaaaaaaaagaaaatagcttgcactccggctgatgtatcccacatcagtgtgactgttaggcctaaagagtcacagtgctgaatgtgtacctgtgcttatctttgtcattagtttctaagcaaggtcttttgcagtgatttatatagcatttagattgtattacaacaggtgatttaaaggaacagaaagcatacgggtaggttatgcataaatattaagccattttgtagaaggatttgaacatctgtgaacttgaatgtctgggggaagcacacttccagtagatactgaaggatagttactctccttgcaatctacttgtgattagaaaatttgacagtgcacgtatgtcagctgtgcaatggaaaggtatacatgcttatcaacttatcccttaaattaaagcataatccaattcctcaagtatttagccctatgttagaattcattatcatatcaaagaatgtcagtgctataaacttaactcagggtcccaacatcttgatgatcaatgtctttgacaggtagagcaatcacatagtgcttttgaccatggtagcacctttctttggggctgtcctgcatgtttatgattcttgcttcctctttattgtagcagtttggggacaacattgcctattgctattctgtgttgaaggaggactcagtgagatgataggttagtttggaatcttcacattttgggtgggaacatgtatttgggggtatcctagttggacaggatttcccttaattccaattttggctctcacattctcagaatggtttgttggagtttcctatagtgaggctaatttgaagcacaaaagtcattcacagagaccccatctctctttgtcatagacctctggattatctcttattggcctgggtcaggcagtgctagtctacagagactgtagcacaaactgtaactcaggaaccatggtatgccaagaactctcacaggagaagaaacatgataacagggagagttaacctgtgtagacaaatactcagccttctaatgctatccatactctagaaacaccctaacaaatactctgaggtggggctactctgtcaatctatttgtctctaagatcttgactaacttacaactggagaggccaatgtgacctgtgccatgaccttgaggacaatggagaggccaatgtgacctgtgccatgagcttgaagacaatgaaatgtcagtcttccggatgtgctggcacggacattctagcacctttagttgagatgattttatcctgagcatctccagatttcccaacctaccacatcatctcatcttttgttcaccaggattattagatgtccacaagacaaacaaagaaacaaaaatgcaaacataaaaaatggtgggctcccctccagaggataaaaaagaaaagaaaaactggtgtgggtatgttttagcattaaggaggaaaccacaggctttatttgcacatcgagtgtttttaacttgtgctgacgttagtgaggaaacactcaatacccagctctgaagttgcatggggagctgagaattccacctggtaaccctggtaacccttgatcttcataattatcttgggaattagatatgattaccacttgccccagtttatggaggacagaaaaaagaagtcatatatgtacatgtctgtatatggcccaggtcagatagctaatagctggagggggaaaggattgaaaccctagtgctgagtgtgtccagtccacagtacatgttcttgctttgtaagaacagtggtcagtggcctgatactctctacttggtactgaggagattcatcacccctatacctgggccagtgtggctgaggaattatgttgacagaagcctctgttaaatagcttgggagatggtcaggaaggtcttggtgaccaggagaggcccactatagagtctcctcccatttgtcagcacatgtttgtgtacagaacaagtactgcttaggcctggtgtctcagtgaggggctgcttcctatggaaaccttgttagcatctcctcacagctaccacttatgcttctgagcatgtgaagttgaatcaggcctgtgatactgagcctacttcaatcattcatttatattcttattcagtgaagaaatatttattgaatgtatgctacgttactggcatctcaagcaaagtaaaacccctgatttgtcagccatttgtctgtctatctgtctgttagactgtctgtgtgtctggctgtctatgtcagcatccacattgtgttaggcagtgatagatatcattgaagtatataagaacaaaggaggtaggagtgaaaagcatttccaagtgattcagggaagacaattttaggactggatacatgaaaggagttggtcaggttgaaccatgcgagtatctcaagggaaagtgtagaacatacaaaatagaaggaaaaataaactagagacaccctcctccgccaaggagaatgcggtttgtgaaatcagagatctgcagaagagggtagagtatctgagacagaattaatacaaccatcagaggtcatgagtgaggtagaagctggaccccatctgatggacctcataagatgtatatcaaataaagagaaagaaaaccaacacagagaatactatgtatgttcagctctgtcctgggtcaaatccttttaaataattttacaagagaatctgagcaagcatgacagatgcttgtctgtcattagataagtcaccaatgacaaaggcaaggtctagacagtctcagggatcagagctaaacctacacctaacttacaatacttatttttggaaggaaggctatacctaataaagtttcattgcttaaaataatactagcaattctgttgcctggtatattgttttgtctagatctaggtgtagctgtaaatatagagatatagactaaataaatgattgataaataaataggagatagatgatgatgacagacaggagggagaagggggcaggtagggaactaactcatgcagctatagaagctcagaactcccaagatctgcagttggcactctggagtgccagaagacctgtggtctagatccagcctggagctgcaaggctgaacaccaggggagctcacagtgtgagttccagctctagtccaagtctaaatgcattagctccatgtgctagtttaaaagcagctagagaatattctctccaggctctttccctcgggccttcaatagattagagaaggctcacccacttgtgggaggccacacagctttacttcatctgtggattgaaagatcacacacacacacacacacacacacacacacacacacacacacacacctgtttatcaaggtatttcgtaataaatatatgggcatccctgtagctcaggcaagttgataagtacagttaaccataacggaaagcattttaaaaattataatagaactaaagaaaacagaaatttaccatgagaaaacttcatcatttttcagggactgctttggccttatggggaggcctgagcttggttgccccacagccccatcagctcctgatactggctggcttctctagattcctaagattcttcatttggcctatgtgagcatgcgccgttttctaggcaactctcgagaagcatagacatgtagttccacataccgcacctttgcgcgccattggtccatttatttgcttaccttaacctgggtttgtgggatatgttttcaaaccaagaagaggtgactttgtccactgagaggcaccctaaggccaatcctatgtcatttgtaatttttgtttgtggttatgaaattgctggcaacaaaaagtaaaagaattctggttctcatggatcagttctgctcgcctgccagctcccctggaacgtctgcaagttcgattgaaatacaactttcagatgaaaaaaatgtgtgaccactcgccaagtgttcttttccccttgatttctactacagtgaaaaataagaatttattctttcttattttaatgttaattgtgttgctggataaatctctaggcgctattcctaataataggaatattaatgtgtgtgtgtgtgtgtgtgtgtgtgtgtgtgtgtttgtgtgtgcacatcctgctttgtttttctgctctactttctgcttatttcccatagcaataattgacccccttccatattaaagaccccccaaaggtagaagaagacacatgcagtgatgccagaatcatcttccatgtgattatctatgtgtggcccccaaggaagttacttctggagctcagttaattcctttaatcagagcccgaaagcccctaatcttgcttctgaacttggaatggcaagccttttgacaaacatctgggaagaaagcacagccagggaagcttttgacagacagcagtagttgagcgcagcagcccttggacagctgcctctggaacatggcgtgcttcagcacccggggagacataacagggacatttcacaggagagatggtcatctgaggccaggacttgggctctgtttcagaaagtcttaaactcctctgtcagtgaagacagattcctccatgatccagatcattcagtgcaggggcagaccttagattagggacattatgacttcgttctaacgtccatgcattagaagtggatactgtaattgcctgaaggttgactccactgcatatcagcactagggcccaaaaatctgcagaggtagaagagtcccaagaggctggtactcaagaattaagatatttccttgtctgcattcaggccagaagggagatgaacttgactttcagtcatcaaatgcaggtcaaataaattgctcctattcaggcactctgccaggcactgggggccagggtaggagatgagaaccatggcttgtatgctttgaaggtcaggctggttaagaactgtctcttggagcacacaggtccatcgtcatggcaggaggtaggtatcaagcatcattcatctctccatccacagaatcctttgtaaaacattgagtactaagagtgtgacagtgaacaagaccaacatagctgagcccagaaagcatgcttactggagctccaattgtgggagagcagagaggatgtgtgagtgataatcaccttagcataaaggtaagaaagtagtatttgagaaaggaggggtgtaagcatatcctagggtgcagaaaatgtgttctggaaggaaaaagggttagtgtaactggtatatttgaggaatagcaaggaaacgataatagagctcccaaaacaaaggcaaagtcaggggtaatgtcagagaggtttggaggagggtgtgacccttttagtatgaacaaagtgggacctactagagagtctagaccataggcgggtcatgatggcgtctcggtattaatacggctctgtctgttgtatgaaaagcataccaccaaggaataaagttgggactgcagaggtctggtgagcggatattctagctagactgagaatcggggtatggaattttcataatggttgaatgtgggtcatgaagtaagcaggctagatgattcagtgtttgtcctgggatccggaatgcctggaattgttattagttgaaatgagcacatccctgaatgaagaaccaggaggaaggatgaggagttccagccattaaagctagagttacacatctgagggtggattctacatagactatcggttatgacaaacaaaggacagatcaaagctgggagtatacatttgcaattaatcaaaagagagatggtatttaaagccctaaaactgaaggaagaccaccaaaagagagtctgtcctggtggaacacataaaggttccaggaaatgcgagcattcagagtttggaaaaagaggagtcaactgaccccagtagactaaggaggatcaataagagatttggttctgtagagatcaagtggatgtaaaccttctacatagaggtaggatgtgagcaaaagcatgcagagaagcactgccagagggttccattgccctgggagaagatgccgaggagaagaaccaggagtaggggataaggccagagtttagatcagagtcttagtgaggagagccttggaaatgggagtctggctttgatcatgatgggcacagaaggtaacaggattgtatttgttccttcttaagccatctgaacaataggaaaaattaatttctcatccaacaggtgacattttagatgagggtataagaatttcttacctgggggaaatactacatttcagggggtccaaatgactgatttgaggagtccagagaacaaaaggggagcagagtgtggcatcagagagctcttgggggagaagaagactataattcctaagtttggtccggaggatggtcacagtggcatctacatgttagtattgtgactctagctgcctaagaagtagatcactaggcaaccaggatagaatgaatggagacagatcttagaacaatggggtggagcctgggcggtgagaccccccaccaaataccagaaaccacacaaaccttgggaatgcagcaactggggctcagccatcacatgcacttacctccccactgcttccccatcttccacctaccctatgcttcacagagttcccccagtctcattaatgacatggaagcttatttatttgggggaactctgtgattaacaccatttcactattaaagagacaaaagagccctgtgcctctcagactcaccaccttcaccccacccactttaacaaggcaatcctggagcctgagagactgaccatcaggtctgaactctcctggcttctctcacatgaactgttgagcaaagcacctctggagacacagggagggcaatacacagcacaacccgaccagcaaacagtaccatcacagcagccaaccaaccagatggggctctgcactctgcctctgtaaaactcagcacaggcagcctgcctgatcattgtccctaggagaccagacccatgagaatggccactgtgccagagaatgaaaacttactccatccgtgccctgcattctctctgtagttcatcatcagagaacactaagtcggggtagtcacccataggggcatccacaaggatttctagaggttggaaccccatcactgccaggattggggcaggggcacaggaggggtctggactgcagccaaccctcagcacccccactcctgtggcagctcagggaaagagcctttgtggcaggcaggcaggcaggctggcttcttcctgaatctgcccataaaaggataaaagtgctgttatctggtcagcattgggtacgatggctgacgatacatttttttaaaagtgtggatcttttcccctttgtgcaaagatgtgtgctcgtgtgtatgtgagtgtgcctgctgtcgcacagtttgctttctgtatgtgctaacagatggatccagccttgtcttttatccggtgttacagaagataaaactgaaaccgagtgtctggctgcctcttcgattcaaaggaggagaaaaaaaaaataaaataaaatacagcagcttttcaagggaacccttatgctacaaaagagtgatccaaaatctcattggatctcggcgttgcttgaacagcagaaacgcagcagaaccatttcaaagtggctttttccctcccccttctcgacttctccaaaatatatgatctcttgtcagaagtaggccaagcttgaaggcgatcatgaattatatatcaagggacatcattacccaggagccttgaacaaatgccccatggtttaaattttacagatttctttcccctccctagtagcagcaatttttgcctgagatggactcagaaagtgtttttacaaaatgcacaatgagacattatgataataaaggtgattgtgcaatggcttggaagtatttctttctgaaagagggcttttatccccaacacactgcctgcaggccaggtacttagaccagtgttctccacttgtcctgcctttatttctgcaggagttaaagacatctagaatgcgtgctgattgagagagagaggctggaatcagctggatatgctgggcccacccttggtggcagagactctgccatttcatttgaataccaaatatgcttcatctacctatttattcactaaggttcaaaaaggctttgtaagaatcctctttatacctgaaactggaaacactcatttgggtaaataagaaaggaggatttggggatgttggcattttgcttccgtattgctaggcattcatcggagagttaaccccactgcagttgcaagcagtggttgcaatgtgcagtacttctaaaccaaagcttcttaaactgtgggtcacctatgggattgcataactgggggtcctgaacaatttagagacagtaagaatttatgaatatgcaacaccaagcattaaatcagaatcagatgtaccatgaatagaaggtgtttccattggcactggcccatgtcacactatgagactttgtcgcatccttggttttgagcacacaacatgtgcagccatgaaatgccaaggaaagctgcctaaaacatgtcttcccaaaatggaattgcaaggcttgtgctgtgtatgcaaagtgttctcctcttatagtaacaagggtttaattatgaaaaacaatgacctttaatatttttctaccactgtttcttagcatgtatcaaattaatgtatctttgggttggactgttttagaaatatatatcttactagtgtgtacatttgcttttgtctttaataaatgataaaattatttttatatataacttgttttaatgttattttatgatttattattggtaaatgtttgatttgttcaatttttgaacaaatatatacctatatgcctatatatacctatatgttcaatatatacctatatgcctgaggtcatgtggtaaaaggggctgtaagtgcaaaaaccttaagagaccctgatcaaggtactgagagccatagctgcataagtgaccttctctgctctaggaaccagagtctctttctagcccattctcctgagttgaaaacggaagtacggagttggttcctctaacagccttgataagatttaagaattccttatgtttgttctctctctctctctctctctnnnnnnnnnnnnnnnnnnnntcctagttgaagatgattcggaacatgggtagttttgtggtgtgctgtctcccacactgccacttggctagatttttgctaaaaagccatcggacagaatggctgtacaatgaatgaggtgccaggaaaagctggaagtgaaagcagtggagggaagagcgttaactggagtgctgaggatgaagaagagccccagggattaacagtacaggaggtccctgctggggactggtgttttataaagtgtaactgcaggcctggagctagaaaactctgcagaaactcttaagtgtgttaggatttcatccaggattcccattcaccactgggatgactcacaggtagcagggaagaccattcaaggaaggaaaacttttctcaggcgataggacccttcttctctcagagcagagagatagtgctgaagaggcttccgttctttttcagtgggaagcaacactgaggaatgcaggtgagctgaggcgcagagaagagggctctgaagagaagcaccctgagggtaaggggacctctgtgctgcttgttccaacttcctgtgctttccaatctgactcttgcattcttaggacaaaaagatcccctagcaacctttgccagtgtaagccagttagaagatagtgatgaggagaaactggagagagagagaacatcatgaagctctggggaggccattggggtgtttatacaagggagtgatgagtttgggattccaaccaaactctgtgtgtgtgtgtgtgtgtgtgtgtgtgtgtgtgtctgtctgtctgtctgtacacatgtatgaacatatatgtttgtatatcaattactacattgctgtgacaagtgaggaaaggttttttggctcctgtttgagccggtttcagtgtgtcataggggacggcacagtgcagcagcttggttcatggcggcagtgagagcccatggatgaggctgttcacacacccaaggacttctccagtgacccgtcttctctgaatagtccacgacttccacagtttccccctgacatctgcaagtggtaccatctgctcgggaccaagcctttgaaacccaaacatatatggggtgtactccagattcaaattacaagtatgcatgccatgagtgtaaactagcggagtatgcactcccgtgtgttagggagaaaggaattctttattcactggtaggccaccggtggaaggtttgcttaaatataatataggggaaacaaagatttgtctttattttattttatttttagttaaataactgtttttgagggatgaactgactgcgcacgaaccttaagaagcacgggtgggaggctaagagactgctcagtgggaggctaagaggctgctcagtggttaaagcatacactgttcttgtagaggacccaacgtttggttcccagcaaacacattgggtagcagctttgcctgttgccgcaggtccaggagatccagtgtctctttctgctctctatagacacctgcaggcagttacacataccccacaggtgtgcgtgcacacacacatacacacacacacacacacacacacacacacacacacacacacacacacactaaaaataaannnnnnnnnnnnnnnnnnnnctccctccctccctccctccccctctctctctctctctctctctctctctctctctctctctctctctctctctctctctctctctctctctctctctctcagtgtgtgtgtgtgttatacatagggatatgtgcaggtgttcatatacatgaatgcatatatggaggccagagtctctcactgatcttaaagctcactatgcagctagactggctaacaagttcccaggatccatctgtgtgtgcccctcctaatgctgggcttacagagaggaacagccattcttggctttaaaaacacccaaacaacaacaacagcaacagcaacaacaacaataaaaaaaccacaggatgctgggaggtttccttttgctttcactcttacccgcccactcttgcaaatctctctctccggcccttggcttctcactttgtattattctaacactggggaacaaggaggctgcatgacgtgtttccactttagagatacagctattgctagagatggaatacagatgttgacaatataacatatgcacatgaagcaaaatgcaaaccaggaagccttgtctcatccagtctaaagaaaggtaaaaccctatctaagtgtgtagactccttatgattttccaggcccctgtggtctcagcacccatgccatgttacaaccaagactcttctcagacataccccccatcattttctcttactcctgtgagttccatcgcttgtatccatttctaaaactttaaaattttaaattatgtgtagtaggaggtatgtgcatatgagtgtagctgcccttgcaggaccccgttgggcctagcgtggttcttgcccactgagccacctctgttcatctttattgttgcctggacctgttccttacgtccttcatcaatgtcgctaaaggctgtgtgactcagcgtaggcactggtccctccgagagtcctttcctagccagagattcacttactccccaccgtgcaggtggagtcctgtgcatatcgctgtgcttcctacctactctgcttcccaccttgatgtctgccatattgtatttaactgtcaagccatgtattcttttctggtagcctatcagttattagcaacagagggtgaggttgccagactttgttttcagaaccttcctaccaagaatggaagaattgtaagaagttagtaagaatctaaagaggggtctcagtgagattgactcttcctcctaagccctgttcttctctctctacgtatgattcatgcactactgggactccatgatgatcttatgtgactggacctagaacctaagatcagcccctagtcagcaccttgttcatcctctaggaccctgtttctcactaccatgcttagctgacatctgaaggaggtgacctctagcctatcgccaagttataacaatccctggtaaggaaggaggtcccactatgggaatgaacaccctctatctgattcagagaccttctgccattgactggctatgtgctctctgatacttgcctattggttttgggtttttgcatcaataaaagcgaaccaaaacatgctatgtgaagctactttgataaggggacattattttgtaaaatgcttgattcataaaagatatgcatagatatcggccagcatgagaacatggaaatcccaggttacagttgagtaaatcaggagattattagtgatgcagaaaagtgagtctcactgggacccattgtcatatgctggtacagaaggcatagatagacctagggcttcaacaacagaaatgtattcttcatggttccaggagccagagtccaagatcaaggtgctgcaatgcctggtgtctggtgacagtctgcttcctaatgctcagatagccactctctaactgtgtgcttatatgaacaatggggaactcagcccgtccgaggctttataagggttatgaatcccactcacccagtcacagagttccagccttgtgacctggtcgctcctgaggtctcacctccatattccgtggcattgggaactagcgtgcaacacatggatctgaggagataacgatccttagtgactggtacttgttcttttgttgctttaattattacaactttaaaaactttttgaaaatttatctaggcctgagtagtcgaatcaaagacatccatttgctgtttggccaacagaggaatgtatttctctttgcctggctataagacccacttcactggaatgtgggtttacttgaaagaggaatgagagagtaaggcatgggaggggccacattcattcagccttctagactccatggttggaaactactttctctgaagctatcccacttcccctgtggctccaggtcctatctggattatagctggcttgttttgagtcccagggaaactgtcaggagggagtgtgtaaaagccactctctctggcaaggtgtggcactcggtactgaatgcactaaagcctgcatttgtctaagagtctatgaagaaggcagccaaggctgccaggcctgggcatcagctgcctccttaaccctactttagccaagccatccccaaggaaaagggagggagaggtacttgctcaggtgccttccagctctcgaattcattctggaagtgtaatttatagctgagccagctgtcattcttagatcaggaagggcaaaattatcttcattactctgcttgcacttctggtgcctgagacgctactgggtcccgtcaaatctagaattagctctgagcccttgggcttttaattaaagggctgagtgagtcagatggtttatggttggcctcacatcttcagggagacacagagggaggtcgcctgttctgtcatcttcctttttagaagtctactgcctctgtgctgtgaggatgtggatcaggatcctcacagagacttccaggaagggcctgtggctaagcttcttcccccagctctgtagacaccaggccctgggagctctgaggcagtaggtatggagcctgctattggtctgttcctggtgagggccagaggtgagccagccccagggggttctcttgtggttccctgggctcaccacagtttgttagtgtttcttaacacgacactgtgttccactttggatggtttgtgctaaatgcattttcaattctcagtggtacaaagaataaaaaggattgtctttttaaagtgggtttggatgtattgaaagcaaggcttcctgctgcgtgtctctgacaattgcctccccaaaggagtgctgggaaacctgttctttccagatatctctacccctgtttgaaaggaacttaaattttaaaaaattacctttctgaccaatgctgacactgtcagcagggtagcgattatttatctaagctgagactcttaggttgcaactttagattatcctgctcaacaccttccagaggaagagaagtttgctctttcactgggtgtcactgtggaggttctatgtgcaatggagggttggtcggtgtgagagtatgtctcatgacttgaatagacccattcacctttcaagtaagcatcccataagctgcggtgtgcccagcactgtgttagagtgagcgctgtctctcaccagcactctccatggggcacacatcaatgttttaaccctttgcctagcctcccagggctcctgccaagaatctggatgctttgttttccttctcaaggatagataatgcatgcacagacttgctttctctcctgagctccaatatcttctcagcaagacctctcagtgcagtcatttgaatgagaagtaacgtctcccacaggcttacatatttgaatatctggtccttggtggatatttggaaagcttacagaacgtactgccttgttggaggaagcatgtcactgaggggcgggctctgagagtttatagcttcaccccgcttacaggtggctctctctgctgtatgagtttggctggagatgtgatttctcagtttcctgctctggctgcctgcagctgtgcttttcccaccttttcagagtctatatccctctggaactataaggcaaaataaattcctttataaatcacttttggtcatggtgtgctatcacagcaagaaaatatgttattaatatagtcagtcttagcgttgctgacatttggtgcaaaatatgcctttgttgtaggatatttagcagttccccagccagaagcactacacacacttcaatttggatgaccaaatatgtctgtgaacaccgacaaatgtctgatacacatctatctttgccaaagtacccttcgagtcttttcctaaaagaaaactcatgaccaggagaagtgtaggcatttcaaacagttaactggggacagagttgtaactataattgaaatagcttactttgtggctagagagatggcaaagtggtttagtgcacttgtggctcttccagaggatgtgtgtttcagtcccagcacccatgtggtggctaacaactgtttatgactctaggcccagggaatccatggctattttcttgcatccatatgcagggcacacttgcgtgtgcatgggacacagacatacatgcaagcaaaacagccatacatacaaaataaaaataaataaaattaaaagcaaagacgggatagatgatagcctagcttctcacaactccactctacactgtggtagtcaataattaattaattaattctgtgcaataacgaaaataaaattgattagggggtttctatagagtgaaaactcctatcatgtctgccctcaagtgtttgcatgacatcattgaacatgaagttgggaagagatgcagttcactttgagctggtgttctagcttcagagagccatggaatcacattgctcttgatatagtgaccagcactgttctcttttgtccgcttctgttccttaactcttctaacccaaagacaaggtactcactgccaggatgctctgcgggaagaggctttagcccatcgtggatccttttggtcatttcttcgtataggtatagaatcgttaggctgggctgttcccccttgtctgggaagtgaaaggactctttctagtcctcagacttacagtgtttcacaagagcagtatgagccccactcttcgagaagaagcctcagaaggttcaccacagggcaggatctcctagacagaatcacttctgggtagggacttgagtgctgtgttgactgtaaggtacttgggagggatcatgtgggatctgtaacaagaaagatggtaatcctttttgctatggttataaagtgaactcttatgcctgaacctctggtacctcctgtcccttagttccttggtagagtggctgattgtcataaaaatgcaacctgagtgacccagagggcacagctggttttagctctttcacctgggtgggtgactcagtgtcaagtgctcctaggtacctctgtgtagtgttactagaagagtgaggagaagtgtagctggccatgcacaagtgggtgttcccctcctctctttggtgtcacatcattgtgtaactttgggaggagcctgtgactgaaaattggatagattggggaagtgataggtgcctgagccaatgctcaggattttatcctgaaggccatgggagatccttgaaaaccctctaagtaggaaagacatataatcaattgtgtgcttgacagattctcttctctgggcagtaaacagggtcaacagcctgagagggatgaaactggtcatgagcttagggggcaccatccagtggaaaactggtgaagcacttgtgagcactaaatgccaaggggtcaaaagggtggagatgagtgtgagctgcaatggcagtgagaacctgagaagacttccaggaggaagagtctgctgccggcttctaaggatgacgtcaaacgcagagggaacagctaggccgagagaacatgaaaccttgcggagcacttttgagttaggctgactttgtatgagtctcgtttatggagggatgtgagcaattggttgaagaaaatggattctgctaggagatgatgaatctgggaaaatgccaacaatggaaggtgtgtttggctgttgtcactctctctgaagatcttattcttgtctcttatctctctgcttcctctttctctcttccacaaggtgtgaggttccaagggtccttctatgaaaggacctgttcttcagggacaggatcatcctttggcttctgagggtgagtgcagtgctgaatgctgatcacatgactccctccagctgatcctcacagcagaaattccagatcccagaacctttgtctagagcaaaagccagtgttatctgggaggccaggatagccttgtctgcaccacagataggctggcttccagctatcatatgtgggtgaatcctctttctttctgttccttaccatgaaggatacaagagtcctgtttccctagtgcctcttttggggcaagaccatgctgccttacctgcttgaactctaacctagacttgtgttacaggagcacacaaagcacctgacacagcatccaggagtgtggactaaggacagggccttaggagttccagcgtggcttataggattcaactgctctttactatatgcgacccttgtagctttgagttcctgagtactggaagactacaaagtattatggagtttgcagtctgctgctgtagcttgaatattaagagcaaatgcctatcaccacaaagctttcaacttgtgctcacaccaccaattgacctttatgacttctgtgctttacagtgccactgccttcaaccccctaaaaccttgatttacaccaggtggcccaaggtagctttgcctcaataaattaggccaatcctgtttgctgattttcaaatggttactttaaattccaactctggaatggggatagtaatactgttgtgggaaaagagccaacaaggctcaaaggatatacatttccatggagctgggattgggattaatgcctactactgttcaacctgcagctctaggtttttgccacagctatgtcctcctttagagtgtataatagcttctggctctgctacccttatgccctccttctcaggagtcactgagcccccgtccttagtgaagcagcactggatgaactgagacaccacacgcctcttttgtacacacttctcgagtagtcacagcatagggggtaaagttctgactctcctattaaggattgctcattccatggtgcacataaaaaatgaacacagatgacacattcgattgtcagagttgcccagagagccttgctggtataccatcactgctttatgaactgggttcagccagagttgccttttaatacctggctgaccaggtactgcccaaccaaggccaagttcagggacagacccaagtttccagtgttcagattaaaccatcatcctggcttgtatgtatgtactggatggagatggtcatcacagattttatactagactgagtctttctgtcttgctgtgctgtttcccagtggagacagggtaggatgtcagctttgacttccttaacttgtactccttacagcttcccaaaggttacacacctggagttgcttccctagggaaagcagagggaggaaagatgtctgatgcttggcatttaattgtctctttactcagagctgtcaggggagaaatccaaacgcatgtcatatgccttccttcccctggaatatctctagtaaagaacattctagaagctgtttccagaaaaaggattcaccttggccttttgttcggtgaatgagttgtggcttccctgaaaggaagagtggagttttctggaggctccagcctctttgttagggacattcactataatgtcataatacaggcaacaaaggccacaggtcactatggacctgaacgtagatatatacttcttattcttgttctgctacgataggcctctagcatctcctttgccaccctgagacttggaccactaacaatacctgggtctctttacagagcccagggacagggcgatacagatgcacaaatgtactattaccagaataacagactcagcgtctcttagttgctcccatctgtgtggtgcagatggatacactgcttttaccataaagactgacctgagtctcagggagagacccagagaagtagtcacagggttccctgcacagagcagcatcggcaggtatgacttttggtaaacagggcagacatctctgaattaggaaacatgcacacagtatgtccttctgcagacagtgaggagccacactgtgtgctctctcagagagactgggagccctgtatggagactgggctgctaagagctgccaggctttccttaggtctcagccaatccccagtctataatatcctctggctacgtgctagaacctcagtgccttcaaagcatggtcaaatggtggttgctctcttgttaatatttcatttacctgtattgatatgtgagttgaatttgtggctgatcttctggtttcaaaagaaagacagatatttgtctcctcctgaccttagattgttaagaagtggggttctcaggaaagatgaaaaaacaaaactgctccttaactaacagctctttcctcctctggcccagggcaggcaaagaaactactcaccctccgggctgaagtgcaattctgcttgtagagaaggcgatgacttggagttatatgtatactgacctcaaaggaacccgggctcatccctacagtgggctccactctatccagtagatgtaggcagcatagtcgtgtctactatatacaccaggggcccatctagtggcctgtgtctgtctaaggttgtagatctaccagcaaacccggacttctgggggactagttgatcatcaaaacagctagtggttcaatttgtggatggcacaaggaaccaaccagcacccccatcccaggtagcttgctaaaccattacatctccagtcacataatttgtcttgaacgcgtgatacatggtcttatgaacgtatgaatttaatcagtctgggagcaaagggaggcgtaattgttccagaggagggtttgggtggattgggaagcaggagatgtgtttagaagagttcttgtgtaactggacatgagaatgaccagtcccatgggactgtgagttgcatttggggaccatgtgtcctgatatgtctgggtcagtcctgggttctcttgtttgtctcaaccacatcaccagcgaggctgctttgtgttcccagaaacatcaaggtttcattgatagagcataaggacatgtagttccatgggacccatatatgcagacgtggtcaatagcactgagcatagttgtgcagggtggaccacagatttcagtgaggtcctgtgcagggtgctctaacatctcggaagttggttatgggttatcacatgggcaagccccttgaacacttgttagtaatgtggctaaaaagtgagatactgtgccgcaatgtcacatggactgtggctcggagtcctcatagcctgctacttttgacctttataaaaaaaattatatagatctctcaactgtgaagtaggagtatgcatatggacctccaagagtttgaatagtgatctgggtacaacatctagcttacttgctgatgtaggacaattagtggcagctgcctttattatctttattactattagttggtccaaggttggtggtatttgggctttactctcagtacctgtgtaatgctgagaggtgactcccatcctactttgtctcttctttgtgaggatgaaaccagacatccaggaatccttgggagaatgtatgctattagcctggggactgtgagcagagttgcccccgccctgcctgccccagctgctccatcctctgggacttaagaactgacttcctaaggcatcaccatcctgtccacccaccctgatgctccatatatctcaagcctccagggtccaaccacttctttctcccatgagtggggctatgtaaacaccaagaccagaatgtcatttactggtgctggctgaccccagtgggctgccagccaagagggaccagggactaaattctccagctggctctgagtactccgtgatatattccctgcctggagagctttccccttgtgaatgaagtgtcctctgttcctgagggatctgcttttatttaattttttccagtgttttgccctttaatatagctgctttgggaaggcattttaggaagtgattagaggcaagaattccagccagcttgcccaagttcataaattgaccctatgtctcaaacactgagtcttttaaacaagaggctaagccatgatgtatctcagttcctttaattataaaagggacaaaagcagtgccaaacttacaggatttctatgacattgcaattttaggggtgacaaggtgtataatcaaagcttgagacacagcaagtctgtctctgtcctttccttcttcgcactgttatgtccccactcctgctattgtgggaaagatgtcaaatgtctccctttggactggagtcctctttctgcttcagagactggcattttgaaggagcccactcccatgctggtccaggcctgtattttctcaggcctttggactcatcatctttctcctcttacctcactttgcccctgccctgttctgccaccacagattctcaagagtagaagacaaacagctgtcagaagctgtcccccagctccttctgtggataggcaggagggggtgatgtgagaggtcactacattggatgtcatcagtagatgacctggcaagccttggttccggggctcttcacatatctgggtttgggcttcccctgttaaataaatggtctttcaagctgaacaaaggctgtggtattgggaaacacatttctgctcaccatgtgctatgtggggtgggggtggagcagccatcctgttctccaatgatgccataggctgccacggtatctacaatcccaggggcagaagcagatgagtatggtaggctgctaggtcgtattgctttggagacaatgagtttagtgttgctttcctcacttctccctgtggatatttggttctcgccgcctaccttgagctaccacttcaaagagcttggattccttacacagataggcttactctgtgttattccatgtttgtttgaatattttaaaaaatgatctacagcatccaggacagattcccagaaggccatttgttgttagaccttgaaacagttttcactgggtctttgtgatcatatctagggaaaaaaagaggcgatggggccataatgagagcactcagtcccccttgttacccaaatgctagccaatggatccaagccaggttgatggcaacaaaagccacagagacacaagcttcccagtgaagtgccttctctaagtctggactgtactttttattagctttgctgatgcacagccaattaggagaaaccaaggagtggtagaacatgtcgccttgtttgttaagggttctgcattctctgctcagtcatggtgccgtgtgagaacaaagagaaatgctaaaacttaagtctgtgtgtgtgtgtgtgtgtgtgtgtgtgtgtgtgtgtgagaaagagacagagacagacaggcagagagacagagagacagagacagagaggaacagaaagagagtcaggcagagagattcagagacagacctggtttgaattagggttctttataaagagcacgaggggggtgtcatttattgaatcatgaacaacctcagtagtgactggatgacagttgttcagcagtaaccattagctaccaacagtccctcagggagcagtgggcctcttgaccctcctctatataatagagctatttttgtgaggtggttgagccatcagcaggtgatgtcatgtttaatgatgtgtatttggacatggggaagctctggaggcctctgtgagtatcaaagtcaacaaaatgggtaggagacatcctagcagggtcttagccatgccgtggagaccctctgggttatctggatgaagatagcccatccacgttgggtgaatgagattcacttaggccttctgaacgactagtaatttgaaagtggctgagagagaaaacagatggtggtgacatgggaaagctctggtgactcaacagcttctcttttgtttctagaaccttccatggctcacctgatctctcaggctttgccaagaggagatggccttgtcctccaaccctttggaaattcactttctttagcatttacacccggctttgtgttggaaaggccaggctgtggtgctggaaataaaatttatgggcacccacccacaggaccctcttcctcatttacaccacaccctattttccaaaaacacaggtcccagctccacaagtctgctcagaaaacactctctcacagagggcgtttcaaagtagctgttttctctatcatttcctacccccacttcacttcctgtttttttcttcctctttctccgcccccaccccatctctcctggcatgtcccccgctgtctgagaacaggaacagagcccagagcgttgataatcataatttcctgtggtgccctctggctgcagctgctcagagctgaggctaggagtccagcctcctggggcaggcaggcaggcaggcagggagctgggcagtcacccttggctttcaaaatcccctccaccctgtcccaaacagaacctagtaagaatactcctccctgtctttagaacacaggcagcttccaaagcactgtgtcctacatttgaggaagacaatgactacatagacaacttttgatttttcaccccaataactgtaattccgttgatatggacaccaagatctgagagtcaggtgcggccctgtttctctttcttttccatattttaacttttgaccatacttgcttccttctcttaacccctccctctactggtgacactcctttttctcttcttcccagttagtcttcctcctctttccttgcttgtgtgtgagtatgcatgtgcatatatatgtgtgtatgcatgtgtgtctgtaaaaaagcagaggccacttactgctgtgtcgctgtttcacagtcattcataacaatattttatagcaatgtatgtgtacgtgtgtgtgtgtttatgtgtgtttgcgtgtgtgtgtgtgtgtgtgtgtgtgtgtgtgtgtgtgtgtttgcatgtgtgtgtgttcaaggaaaccctgtgcaggttggactcatcttttgttctacagtgcactttcttcatgcctcagcagatgtagctgtaaaaagttcatggttttggttgcttggacaagtggagttcatggtacctagttaggacagttttaagccaagttggggaaacatctgtgtagaattcacatggtatgcctggcagataggatttggttagcaaatgttaggtgctagatacttgcacggcttctttccgcccattttctgtgtagaagggtgtctggtcaaattcactggcaggtcagaaaatctttttaagaattggtactcaaggaacacgtccataactttccctattcttctgcaagatagggagggagagagggagggagagggagagaattgttgccactaaaaagcagaggccacctactgctgtgtccctgtttcacagtctttcataacaatatttttataacaagaaacatgggcaccatcccagccacatagctgcagtggactgttttaccaatttagtctcttcatggtaaaaccataaaagctacaaaaaccgcagtctgtggaaagcatcacctccctgtgtgaactctgcttttaaaggggagctgaaacgtgtctcagtgtgtgacatgcttgctgtacaagtgtgaagacctatgttcagatcttcagtgttcacgttcggctgcacaagcactgtgacctcatcaatcccagtgctcaggaggcagacacacgggatcctcagggcaagctgactatagagagactagccaactaggtgagctgagaggtcagtgacaaaccctgcctcagtatctaagggccagactgactgaagaagacacccaatgtcaacctctggcctccacaaacatgtatacacacacacacacacacacacacacacacacacacacacctgtgcacacaggtgtcctcatgtgtatgcatacacacagacagtaaaagacttcccgttcagagccagcagccactcttctgtcagtttgaccatgaggctgcattgctttatatgtcccagtacagtggaacgccagggccaaaaagtgcgtgcgtagaggagttggggggtgggtatgggggacttttgggatagcgttgggaaatgtaaatgaggaaaatacctaattaaaaaaaaggaaaaaaaagttcaagttgccagagtcagaattcccaggctggatctgactcccaagttgatgattctgagagatgccgttttctccttcgagccgtagtttccccgactacagaatgaatggattgggcaagtttaatcttgtaggtgtcttttaacatcgcccattcccaattcttggactttctgtgcttggctttaaaactgcactgtgatggtagcatgcctagaaattgcctgtcatagtaacacaaccttgatttgatttccacagagcaccactcccataaggacagagaccctcggggaccacagacttgatttggagagctctttcctgtggcctcatagctgctcttctgctttgtcccttcagtctggattggtgacacacacccactggagattatttccaggtaatgagctgctgtgtgtgaggatgtctgagagtggcaaccagcatttcagaggggtgcgtgtaatgtgcaggtttgtgcgacatttgtctgtacaaaatttggtttgtcatctttgattagaagctggggctcctaacaccatgtctcaagaaaaaccaaatgaaaagggacataaacaagaattgacatgtattctgaggaagctgtgattaggaagtggtctgaggcctctgggcttttttagctctatcctcaatggcatctgctcctctctgggtgtctggaatatttaggcatgaagcaggggggttgatgcactgggaaggagttattagagttggagtttcagctacttccccttgtatcacccatttaagacgaagcacagttgacgccctttctacctttattggcttagcaaattgggacacaaggacacttgtaatacacaggctgtagtctatgtgatgttcttgttgcaccttttctgacaacatatgtgtttctctaatgaccttgccccttacttagccccaccaatactggacagtgttcgtcttcctatgagtagtacatagtctgtttgcatttcttcaatgaatttgcacatagtgtgggctgacaatgaatttgcacatagtgtgggctgacaagcctccccatttgactaaagatctatgggtttaagcttcttggacttttaatttattagcacatctttcctaggcggacctgggacacagcctaagattagagagaacgagggcagggtttcttacacggaaacgcattccctgtctgtgcccgttgcgctggagctctccttcaccaaaatgatctgcagattccctgaaagctaaaattaggggttcatgagcataagacaggacagagctgagtcaggtgaccaataaagtgacccatagggtcttagtcagggtttctattcctgcacaaatatcatgaccaagaagcacctagggaggaaagggtttattcagcttacacttcctacactgctgttcatcaccaaggaagtcaggactggaactcaagcaggtcaggaagcaggagctgatggagaggcgggatgttctttactggcttgcctcccctggcttgctcagcctgctctcttatagaaccaagactaccagcctagagatggcaccacccacaaagggacctctccccttgatcactaattgagaaaatgccttacagttggatctcaaggaggcatttcctcacctgaagctcctttctctgtgataactccagcttgtcaagttgacacaaaaccagccagtgcacatggtcaggtcccagagtcttcagctctacccttgtttcttgttggttcctggatgaatagccttagccttggggtccatgccttcctttcctcctcttgcctttttgctcgacagtgctcccatctcaaagaacgagaaaagtggggtgagctgtgaatgagaaggagcctagtgtgtactcagctctgtatgttgactcagtggctcggctgacaacactgctaagttgctgagcctgtgtctcttcctgtagtaaggagacagtgactgtgtccagagctgcctgtgagggctgaaggacataacccattgacatagtttcttacttccggtgaaccacagcaaaggttagatcctttctccacccagcctttgcacagctacttaatcacagctctggccccatcatgggttctgtgaactgtgtgcctataatctgagggcagatgctgtccccaacatcagttggtccccagcagttaaaaaaggaaaggctgtcatcaggccttgtatttcaaggcttctctttggcttgggccagggcatcctcaccagcctagccatttggaaagctttctgactacgctgccatatgcaacttcaagacccacctctctcccaaccccttgaccatatccttggttccctgacctaaactctctcccttccagaaatctcttcccttcagatccgcactgcctatggcctagaggtaggaggaccatgtgatttgggcaggtgttctgatttgggactcagccagaaagttcagttccaactacagtctcctccagaagttcttccttggctgttagctgttagaggcatttgccacacacccccagccatccattcattcagcaaatatttgtaaagcatgtgttatgtggcaagcggcaggtgtttcttggtgttaagggtaaaagtgtggaaggaaacaaagttcagattctttgcagggacctggcatctgcgtaaggccagggaccaggattgattagcgtgtgcacaagtgttagagagggcacattcagcacaatgggaaaaatagagcaaacaaaaacagctaagtaaatgcgagccagaggggtcaggctgtcctcgaacaggtactactacagggttgggccgcagactccttcctgatagagttatctcagcacgattggaagatgagggataatgaggtgagaaggaattgctgagacaaaggctccgggggattgtgcttggcctttctggagctaaaagtatctagtgggggttgaagcagagggctgcgggcagagtggaaggaggtgaaggcagggaggtgtgggcagataatggggacccttgaaggccactggctgtcaggactgcagtgttgatgtcctggctaacattgccctcaccattcctctcccttccccagtacatgtcaaagcctcatccctaaatagacacaaagataagtgctcttacctaacggagtattagtcacccattcaacaagctttttctgggctcggactcctaagactggagatgaatgcggctcggccttaggagtcttcctggtgctccttcacagccctgtggaggagttcttcaacagattagatcgaggcgaatagttaccctaatgtgatcagagcagaaccaatttgctaaaagtggactttttttcttcccagaaccacccaaagatcacttctagcagcgcttctgctgctcatttgcataacaggcttttgccaggacttgccttgaggcccagggaagatcagttcattccatcaatgtttggatgttcttctcagtcagcacctacgctcagtcctcagcagaactgctgattagagtcttcgcccacacctggcttgtttgtaggcaccaggccctgcatcgcgcaacacatagttaccagcagtaaggcaaaagtgctggggaacccaaggaccccagtgcatccaaaggccggagtggagaggctccctcagggtgtttttcctgtcagacctagtcaggaaacctacaggtaagaagcagggaggccccatcttcatggaaagatgtgctgaatccctaggagcaacaagaacactggccttggctctggtaggactctgttttcctagtgacggcagctggagttagagaaccctctacagaggcagagctatcagaacaggagtttgtaggccaggccaggtggtttgaacttatctgaggactgtacagtgctcttgacagatactaagcaaaaatggattacccgggctagggaggtgtgacctggttgccaaggtgctggttgtgcaaatacaaggacccacatgaaacagggcccagtgtagtggcccactctgaaaacgccaacactgctggatcccagacagatggttcatagggcttgctagccaggaagccttggtttgttccaagaaaaaaaacagaaaattaggtggtcagttcttgactagtagaaacctgtatcctacacatatacacacacacacacacacacacactcccaaaacagcccccccccacacacaaatgtgtacatcgtcatacacatgaatatgcacaccctacacacaaacacatgcacatgtacctgcacacatacacacacaagtatatgtgtacccaaatacatgaacctatacccagacagtagtgcatccacagaaatatatatgtaaccaaatacacataatcacatgcagtacacaaactacatggcctgtgtactagctagttttgtgtcattgacacaggctggagttcacagagaaaggaccttcagttggggaaatgcctccacgagatccagctgcaaggcattttctcaattagtgatcaaggggggaggtccccttgtaggtggtgccatctctgggctggcagtcttggttctataagagagcaggctgagcaagccaggggaagcaagcaagccagtaaggaacatccctccatggcctctgcatcagctcctgcttcctgccctgcctgagttccagtcctgccttcctttggtgatgaacagcaatgtggaagtgtaagctgaataaaccctttccttcccaacttgcttcttggtcatgatgtttgtgcaggaatagaaaccctgactaaaacaaattggtaccagcatagtggggtattcctgtgacaacttgaccatgttttgtggaggactacggacggactttggaactttagctagaagatctatttggtgttaagagctctgtggaatgttgtgtaggagcttggaagataatgttgagaacagtgcagaagatggagacctggcttgtgaaatttcagagggaaaattaaagactctttcagggccattgctgttttgattgggaagattctgtggttctgtttagttggggctgaagaatcagctgtgattaacaagataccagaactacaaaagcaaaaactttgcattactgggactattgatgctggttagctggagctaagaaattagcagtgattaagaagagaccagcgacacatgctccactatgttcatatcagccttatttataatagccagaagctggaaagaacccagatgcccctcaacagaggaatgaatacagaaaatgtggtacatttacacaatggagtactactcagctattaaaaagaatgaatttatgaaattcctgggcaaatggatggacccggagggcatcatcctgagtgaggtaacccaatcacaaaagaactctcacaatatgtactcactgataagtggatattagcccagaaacttaggatacccaagatataagatacaatttactaaacgcatgaaactcaagaagaacgaagaccaaagtgtggacactttgccccttcttagaattgggaacaaaacacccatggaaggagttacagagacaaagtttggagctgagacgaaaggatggaccatctagagactgccatatccgggatccatcccataatcagctttcaaacgctgacaccattgcatacactagcaagattttgctaaaaggacccagatatggctgtctcttgtgagactatgccggggcctggcaaacacagaagtgggtgctcacagtcagctattggatggatcacagggcccccaatggaggagctagagaaaatactagtcggccatcagtggaaagagaggcccattggtcgtgcaaactttatatgcctcagtacagggtaatgccaggaccaagaagtgggagtgggtgggtgggggagtgggtgggggagcgtgtgggggactttttgggatagcattggaaatgtaagtgaaataaatacccaataaaaaaaaaagaagagaccagcatcattgaggtgacatcttctgggaagtgttttctgagagcacagagactgtgttccagagatagccaaggttgtaccttgggctgtggctggacttagtaatgtgtaagagttacccacgtggtattggttttgaaggcatgaaggggtcatgctgagcagctgaggctcggcactgtgagaggccatggaaggccaatggtgaaggtgcagcctcagttgcaattgaaggcccaggactgaaggggacatgcaaaggagttgaggctgggcatggtgaagagagtctatgagaggctattgaagtcaagttacagtggaagacaacagcattttggagatgccagtaccatgagatgacgaccaagaacagcagcaacagtggagtacaggcagctggagcctggaagacaaagtgtgtgctacaaagggcagggctggagaagtgacccaagcccttggaggagcccagaagatcgtgagttggatcccagacattggatgcttttgattgtgactgtgccctgataattttccctcttgaaggaagttttttagtgaagcccacagttaagagactttgaattttaaagtactttgaaagatactggatattttaaaaggattgaacttttaatatgtaaagactgtggaacttttaaagttatttagatcttggggatgaataagaatgtaagggttgaggcttactagtgatgtgtttgtgtgtcaagttgacaaggggtcaattgtactggctagttttgtgtcaacttgacagagctggagttatcacagagaaaggagcttcagttgaggaaatgcctccatgagatccaagtgaaaggcattttctcaattagtgatcaaggggagaggtccccttgtaggtggtgccatctgggggctggtagccttggttctataagagagcaggctgagcaagccaggggaagcaagccagtaaagaacatccctccatggcctctgcatcagctcctgcttcctgacctgcttaagttccagtcctgacatcctttggtgatgaacagcagtatggaagtgtaagctgaataaaccctttcctccccaacctgcttcttggtcatgatgtttgtgcaggaatagaaaccctgagtaagacagcctgataggaccagggtttcagagaaaataaaggacttgatttcctttgccccctccctccttattcatnnnnnnnnnnnnnnnnnnnntcatttgaattctaactttattcctcttctacttcttgggagatacagttttctcaggtctaaaggagatattcaaattgtacagaggcttcatggtgggcaatgggtacaagggccctctctaccacccagtgagtaggggcacagcggtagggtactgtcttggcacaccagttgctgtgagagatggatggagctaagccttctttctaataggtgggctgcctgattaacattcatactattcttgtagaggcagagatgatagaattcgggtccattaaatttttcttcagttagaaaataaatgcatgatttccatcgtttaactctctgtccactgacactaaaagagaagtttctctttataaacttggcatttgtaaaaatacacggtgtgattttccttcagccaggcactgaggtcggcctgtaaataccaataacgggatatactcaaggagttacaattttctaaaagagacaagggagccaatagtcagagctgaggctcgtaagtaggaaccctgacatggacagagtgatgtgggcaggctgcgaggcatgctgtctgtttccatagctagcagagaaggtcttcatggggtccatatgagctgggcattgaagaatgagtaggagctaggggttgggagagaggcacgtctggtacagaaacactgtctataaatagggaccaacgctccagtctccgagataggagtggagagaacttgtcatgcgaagatcatgcctcaacttgctttttaaaaatccattaggagctgcctcctcatcctcccacctgttcccagcggtgactaacaagcagcaaattgactaatttgccttgatctcctccctgaccccatggaggaatctgtaagcataatgagattagaggcaccaaaaaaagaagtagaaagtggatgaggaggaggaggagcagggggaagaaggagaagggaggaggagaggaatgcagaagagaagaggaggaagaggagagggaggaggaagaggaggaggatgaggaatcagaagtagcagctgctgctgcaatggtgtccatctctgttttccaggtttcactgtaggtccctagtgataaaatgcagcatcccagagagggacctgctgctgccttgtgagtatgcaaaccaacccttctccctttctctaggagagagagagagacagagaaacagagagagacaggctgagacagaaagagacatgtatgtagatatacgagattggtttgtgcatgcacattctatatacatgttgtctatggttgtatatgtgtgtttatatacatcgtattcaatttatttgagaacctagcacagagccttgttcaatcaactttccatggcctttgctggcaggaagacgaatagggggatgagaattaacctgaccacctacatgctgttttagatgtgccaaggtcagtaccctgcatgctatttttacacgaagagagaacagtgggttgggtctcaaagacagtgtagctctggtgacacagctcacccaaggctctacagctcttagaaaatccaaatccaaatcatgccctcttccgtggtttgtcaacctttctatgaacagagtttctggtcagatgacgtccttttgtgtccttggccatgccttaccaaatgctctcagatgcagaacttcagagagtgatggcagacaagatgcagatctgcaaactctcagaatgcatcccttgccatgcaggtgtctgcccacagcttccagggacaggaaactcactagcacatgaggaggttgggtctagccccagatgccatgcagctttttgttcttgtggactcatgctgaacccagccaggctttggttctcatggccacgaacagctcaacagtgaggcgctgaaggctgcttgtgttgctgccctgatggagtttcctgaagactcatttccctccctgcagcaagggcatacctggttcttgcttcttggcattcaagttgtcctggtgggctgaggttgcaggtggatactcacttggctttgtgaattctctcctctcaagagaattcaggccaaattttctatcacccacttcttaatggggagtgaggtcttcctttgactaaaggatttgagaggatgctaggaaggactgacatggagaaaggaggggctgggctggcattctcctcagatgtttctatggagacctagcgagacccctccccactcaccatgacctcccccattacttagtcaggagccctcataggcatctcctgatcagccctgctatatgcccctttaatcccccaaatccaccccagatagtgcaccttaagtaaccctttctgggtgacaaagggtttgggtttgtttgtttgttttttcctccaatggtgctgcctccttgtggcacttctcagtattacaggacacaggaagaagagaaactagagggggcagagggagtactgccactgggagccagcagttcagctgcagtcccctgtcttttgggcccctgtacacactgaggctctatgtgtgtgtctcctcctctggcttgtgaactaggagaagcatatcagggggtttggtaagccctgaggctgagtcagcctgtcttttcagccacctaagatgccaaccctctggccctgggatggagatattagctaacttgtcataccagaaaacatcccggggctgggagtgggtgcaagctggcagatgccacatagaatggctccagctgtatttcaactaaggactcttgcttggccatcattgtccctcaccagaacccctggtgagccttcaggctcaaggaagcaaaggcgtggcagcctaccagctgtctggatttgcaaacacatgggatacagacagcctggtaacttgatgacgttagcagagtcattttcacctacttcccaggattcccatattgcaaatagtgtacaccttaggggatggttgaaattggttcaaatagcagccattacataattcatatataatgtggcatttcgaggagcacttatagctatgttctcccagctcttgaatcctgagcatctacagaaataaaatgagaaaagagccacacatacgtgcacatgaaggctcccgtccctgaatgggttaatacatgcaaatgcacccagccagcggtgtctggagtacataagaactcagctagtgcttattctttgggttttgacctaaagcctctgggatttcctcctagaagaaggcttttgctctgcagagccattcagcttttgaatgcctgcccgttcagcagctcccgtgtatagaatattgaagtcccagggaatgaacacacggaaatgaacagcaacagtgatgatgcgcaaaccctgtcaggtatcagcggcctgcagcatcaaccaagggagggtgtcaggtcactagaggaaggagcattcttgaaccaagggagttctcagaggatgggtggagcttgaggggcaggacaaaatcagtaggctgagggagtggtgggcagagggggtggtctgagggtgacgcaggcctaaggtgccattgtgagtgggaaagatcagccaggagggaaaactgttctgtggaggattttgtttttggaattttttgttgttgttggtggtggtggtggttttttttttttttgggggggggggtatttatttatttatttatttatttatttttttatagtcggtgggactttgaagccttggctataatccctcttcagtggaggaggaggacgtagcatgtgaaagtgggggatcccagcaggagggaattagctgcagcactaggctcctgaactggcccagcagactccctgtccctccctgtgcatgcagcctgagcccggctggcctagacccttgaagagctcaacaaagacttgcctgttcccttcatgacatcagatcttaccctcaggatttctctgtcctactggggcaggatctcacacagtgataatagaaggaacgggaagagatgaatcaagttaagcctgtcgcagacatcaccatgccaacgtgctgggcctagaaggggaggaagatgctgtctactgggggcactttactggcccccaccccacccccgggccaggttccaggggctgggccactggtctctgttcagattgtccccagctgcctggtcagtgagtataaaatgctaggactggatgaaataattgcttcatacaatggactggttcttttctgctttcttaactttttcaaagtatcacattgaacaaaatgacttttttcttttgctttttttctgaagccacagggtcaaacttggtagccccggctgacctcaaacttgatcttttttgtgtgtctgcctcccaagtgatgagatgacaagcatgtgtcaccaagccagcctgtgtcaccaagctagcctgagtttccttcgatagcaaagatttatgaagggagttttgccttggaatctcgtaaaagtataccgtgtagagggtatgggagatcaccaggtgtgtgtgtgtgtgtgtgtgtgtgtgtgtgtgtgtgtgtgtgtgtgtgaatgtagacaggagagtcagcagtgttgataatggaaagggttttgactatagccatgcattctcagctcaaggaaggaaatggtgtgtggaacgacagcccaaggcacagcctgtaggcccactcacagatcttatccctgtggacattttcattggggcaaagatcgatcaatgagcctacttctaagtctaaatgcaaataaaaccagcatgagagccgtcaggggaaacaaggttaaaaagggaatttgatggtgggatttcaagtccctgggtggggtgcagtggcctccaaccttgaagcacctggggaacattaatacagacgcagggcatgcagttctgtagatgtgatgaatctgtgagtgggtgccaaggctgctacgttaggcttagagcagcaaggatccagaaaactcagaggaaaaaaaaaatgttttgtatttcatgactagaaannnnnnnnnnnnnnnnnnnnnnnnnnnnnnnnnnnnnnnnnnnnnnnnnnnnnnnnnnnnnnnnnnnnnnnnnnnnnnnnnnnnnnnnnnnnnnnnnnnnnnnnnnnnnnnnnnnnnnnnnnnnnnnnnnnnnnnnnnnnnnnnnnnnnnnnnnnnnnnnnnnncaggttgtaagcctaagaacctgcgtttgaaacccagaaccaaccgacgtggaaactctgggtgtggtggcgcaagcttgcattccaagggaggcagagacaggaaggggctcagggctcagcagcccattggtagactcgaatggcaccccgggagatgacacctaatggtgtcctggagcctacattcacacacacacacacacacacacgtaattgtgcatacatgaacacatacatacatacacatgcaagatgatttttaaaacctacttttcagaggaattagagagagccagaaaggaggtgtgcatcctaccagctttcaggtaatggtggctaggaagagagatgtggcccttgctgctcacaggaaacagcaaggtgccccatgcatgacagaccccccacccccagatgatggagaagctacacggtagagaagaccaccttatgagaacccgattcgccctgttgtacgatgacagtgactataggtccccaccttacaggacagaagctgaagtcgtgggtgtgatggcacctcctccaggacagcttgcctatgcgtatttcttaacacgactccagttcttcctctatttagacctgaagctcctatctgtctcccgtagaggaatcagagtcactggttgagtgtagcttgtgggtctgctgaagccagggcttttgccccagagctccagtttcaaggatgctcctctgagccagactctcagaaagaatgctcccagggccagctccatactaggagcttgaattgctatcttccagcagaattaaagaaaagccccgacagcattccagctgatcatgcagcctgcaggccctgcggagagtgaaagcaaaacgggtcagcctttcaaacacgcctggacgctcagcatggcctgcagacaccaccctgggaaggctagcggcgggggaagaagatggcatatagccagcaagtcctcactagctgctggactgggcctgaagagaaatctggagataaactttaaagggtttgtttgttgggttctgtcatggtcttagttcatttgtctaaacaggagagttccttgggactgtgtggcttctcttgtgtatcacaaagcttcctgcggaggcatccattgtggaagctgctggactcctctttacccataagtacaggtctgggataaatggaaaaatctcttcttctgatggcatttcaagcagacttttccaatatcagtattgtgtgtatgtatatgtgttgcatgcatgtgttacatgaaggaatgtttacatgtggggaagggggcgggggagtgctcaggtgcccatgctgaggacgaaggaggatagcccacgtcaagcctcattactctcaaccttacccgagagtcaaggtctctcactgaatctggtgctattttgcaggtagtcttcgcagctagcaggcctgtggtctgctccactcagccaactggggttacaggcttttgtggccatcctggcttttctgtggtgctagcgattcaaactcaggtcctcctgcttgcatagcaagagctcttacccactaagccacctgcccatcattattaagttcctgagctggggagacatgctgtgccgatcctgggtgttccatacaatgccctttccaacacctacacttcccaactgaagtcaggacagccatgaggaagatgttttcctctttggaaatatgattttaaaaattcatcaaggaggcagggtagggtaattactgggccaaatgactaaatctattcatttttcccctctccaaaatcgtgactctggcaaactagactcatggttctgagattgcatatgagcaggaattgagtgtccacgttaaatattgagtgttatagcgtcgagttcaaaaactttactccagaactatgtgctatttagaatgatattgcagcagttgaaatggatcctgctttgttcgctttgcaaactgcttttgtacacaaaacccaactgtcccttttcatgtgagacaataatgccctctagtggattacgtgcttaattgcaagctcgtctatataaagtcttcattttaacagaaatatctagtttaagaactcaagattatactagactcaccatcctgactcctgttcttccaaaagagtccccaagctccatccacagtttggctgtgggtgtctgcatctgtctgagccagctgctgggtggagcctctcaaactacagccatgccagatccctgtctgcaagcataacattatcatcaacagtgtcagggactgatgcttgcccatggaatgggtctcaagttgggctgctttttggatggccatcccttcagtttctgctccatcccccattcctgcatttcttgcagaaaggataaatttgggatcagaaattttgtgcgtaggttggtgtctctatcactccactggtgtttctgcctgggtacagaaggtgacctcttcaggttctgtatccctaatgtcatcagtcacagctaagttcatccccgttgattcctggctgcctcccttctcccaggtctctgtcttgtcctggagatgcctcccaactccccatcccggtcggttgcagattcccattcactctcatgacctctgggcatctttcctgtccctgcccatacttgatcctgagcccctccattctcttctctatcccttctcccatccagttcccttcatctgctacttatgactattttattctcccttctaagtgagagtcaagcatcctctcttgtaccttccttctggtttagttgttttggatctgtgaagtgtagcatggaaatcctgtattttctggttaatatccagttataagtgagtacataccatccatgtcctttggggactgggtaatctcactcaggatgattctctcaagttctctccttgtgtcagtgaaatccgtgatgtttttgtcgtcatctgtgaaacattcacttgttctactctgtgtgtagggctgatgtgcattggctcaaacttctgacttatcacgtactagagagtagtaaggaacaggaggcagagctcacacagctcaccagacacgtgcaagtgtgtgtgtgtgtgtgtgtgtgtgtgtgtgtgtgtgtgtgtgtagagagagagaaggaggaggagggagaggagaaggaggaggctagtctatcatggaaacaaaaggcaagggtgaggaggggtattgagtgtgaatggaagtaagatgtgggtggagttagatatgagctaaaacatgagtaggtcacaatttcaattacacataatatacagacattatggcaaagattacaacttcttccaagtagatgctgccattccctgggctatgtcagtagctccagaggcctctgggccactactaagagtgctgtgactatcaccgcattgatacttataaaacactcttgacttagtgcctttctgttacaacttactattattataaaacagggagacatcatttgagttcctggggctggaaatgtggcatgtcctcaattacttcgagcatcccagagggacagtgtttgagttaaagaagcattgtcttagcctttagattaaactgggcagtcctggtagtggggcctgctttgtggaaatgcataaaaatgatttgtagttagcatattgaacctttcatgatgtgtgataacttggatgtacagaagggatagagagcgacttctctgtgggcctgtccattctgtgtcgtttctgtatgtctcggtcctagaaataagctccctgcacctcgttcattctttgtaccatgtctacgtacatcatggtacatgaaggatgtgactctatcaccactgtcctttttgagggactgaagatgcacaggctgcagggaatagacctgttgagcctctgcacggctgcactgctcctccactctcttcttacacctgagtggtgacccctctctgactagcatatctggtggtttggccttaggctgtttcaattatgttgggaatttgggcaagctcattgggtaaaatctagaccgttggaacagagaagtgtttctgtggccccagacactgggttataggtgatcaagggatatagagactcagtgcaagaaaattaaccttcttaaacatcaacttggccaatagataactgaagtgagatttttttgacccagtttaacactctgacttagcatcagtgtggtcactgatatctttccggcaccaaaggcctcatccatatttctgccctgcttgttaggttgcaggttttctaaacaaccaatccctagccagctctctcgacctctctcctttgctacacaagaacagatcttatggtgatgtattgccctcatgtacacaacacgcccttccttttcttcgcctgggacaacttctctctccaattgagcctgctgttacttttctgaagcctacatcctagtctggcatgcaggaagtttggtcaatgccacttacataacttttaaaaagagatcatactcagtatcatacagttgaatgcacaagttgttttatggcttcctgggtgtggcttctgcaatgtcactctccttcccttgccagaagccacaagccatgtgttaagctgttttctgttcctccaaacattgagtaatggttctagagtatcagatgagtgggttaacacagtggcttaaagtgtgagttttctgggataccctgtgctcaaatcctggtgctgccagttgctggctataactatacaagctactcaacttacatccatcttcttacttgtaagtcatggttagccctgtgggtgcaatctgacaatatccatgaattattcagcacagtgtcgatcagagaatgcgcacagtgtatgggactgggattgttaaccagatccctatgtaagaatatgtattcagtttcatgttttcttggctataactcaatacacatgagccatgtgttctgactgccaaaacttcccagtaccatcctggtcttgtcagtggaaatgtagggcacagatggagtaaagatggaggcctgatgtttggaccacacttgagtgtctccagatatggtaccagaaacgtgcttttatatgacacacagagagggggggagcaggcaaagacagaggtgtgtgtgtgtgtgtgtgtgtgtgtgtgtgnnnnnnnnnnnnnnnnnnnnagggggggggcaggcaaagacagacaaagacagaggtgtgtgtgtgtgtgtgtgtgtgtgtgtgtgtgtgtgtgtgtgtacatacatacagagagagacagatatacatatgaatacagacagacagatagatactctattgtgggtatatatatgttagaagagatagatataaaaataaagagtcctgggggtggtgtgtggcaaagtactgtagtgaacatgatagttagactgggtgctgcagaaaaacaaactgaacagagacctggagaaaagcatttgaaacaaaaggactaacgaggatgagaaggagctagtggtgggggataaccttgaacgaacacagtgacaaggccaaggtagcgagagcagagcagtgaaaccttggctggcgagcaaacgccataggctctcgctgactctggcaggcacagtacttttagtgacgtggaggtccctggagagatttaagctgaggggtgactgaggctaattttaagcacaaggctatagtagctagatggacaggaagctgagtgtttgggcttggagacctgtgcaggaagaaacacaggatgctctggcgaggaatggtggattccagcttggtctgtgcactggctgattttgtgtatctacttgtcacaagctggagtcatcagagaggaaggcacctcagttgaaggagtgcctccataagatccagatgtagggaattttctcaattagtgaaccagaagggagggtccagtccatcatgggcagtgtcatccctgggctggtggtctggggtcagtaagaaagccggctgagaaagccatgtggagcaagcgaatcagcagctcccttccatggcctcagcatcagcccttgcttcaaggttcctgccctgcctgagttcctgtcctggtttccttccattgatgatgaagcgtgaggcaaagtgtaagccgaataaactctttttctccacagcttgctttttggtcatagtgttttgtcacagagtagaaaccctgactaggacagcgtgagacactggtaattgagagaaagaattgaacacatgacctgtctcaaaagcagagttctgggatctgttggcttgagtgcggagtataggatctgtgggatctgttggcttgggtgtggggtatgagatgcatcaaagtcaggtcagcatcagcgccttctacagagcatctggaagctcacccagttgccatctactgagctagggaagacttcaagggctggttccaaggtaagaaatggagcctttctttatggacgggttaagtttaggttccctgggagaatctaagcatcgcctcagtgtgtggactttaggggacgaggacacagtgagttacaagctggggtgtcatcagagatctcatttagagtcctcatagataccccctgtaaagagaaatcatccccattagtcaggtcagaattcagacggagatgccagacttaagggagacgccagtcttaagggagatgccagacttaagggagatgccagttgtggcaacggccactcaatgcttggcagcagtgaagtcatcagttactcagagtgaagtgcagaccaggaaaggttaagtgaatgttaatgaaatgcattgattaagactgtcgaactagaaaaaggctgctctgctgtttcctgcagggccttcctggatccgaatactactccaaggtggggcatcaccaacggctggtgaagcagtgtgtccagggacatgtacagagctgtccacaccaacacataacacacaatgatgccatgtctaaaatagagatggcaatagtgttagagaatctagacaccaggagttaaggtctctgttctgatcaaaacatgatggcattaccagtaggcattgtatttgcctcttctgactccatatcagtgatgtggccatttctatcctattgaaagcaagcagagaagaccctttgtatcaccctcaccacgtgtcaggcaggtactcgatatttagtatttgatctcagagcagctaaatgagtggcatgaattcagattataaaacaatatttgaaggattatatgacctatcaaaagtgctgaagctagtaccggttgtagttgcagggttcctatttcccaaagttcacacccacccagcttttacagcaaagggcaaaaaagaaattgaggtcctgagcatccttcaggttcaagtctcagcatccctggcctgcagttccagatatggccagcagagggagccgtgcaccgggcttctggggcttactgcccgaagccatattgaatgagccaatgtctgctgtgcggactctgtgagatctaaatgtctccttggcaggaaattcgcaaggagcaggacggggttgtgcaaacagccttacaatgtccgtttgtgtgtgagcacatggcttctcccacttcgcccacaatgctctgttttgggggaggataatgggcctctgtggacccctccgccttgtcatgcaaagggagtgacctgtgtttgtcataaatgggctcttgtatgattaatagctctgtgaatgagcccaacgcagccgttcagcgcccgccttcccctggcggtggtctgcgtcggctttcttcccaccgcgaaagcagctcctgcagattttaactgaaaggaaaaggacttgctccccctgtggctgcagtcctacagatgcaaagcagggggcacacacaactagagtttgctttggggatgaacaggggtccaaagacaaccttggacccttgaccaacattctcttatgtgtgtcaaaactgaaagggaacactttgttttttatggacaaggaaaacccaagaatctagagtagaatggcacccccctccctcctccccgtaggctccaaaactcgaagtatttccagaaagtgattaccctttgttttaggatgtttgtttgtttgcttgcttgtttgatctgacctcccctgactccgctaccctcacagagcttggtttttggtggtggcggcggtaatgtgcgtgtgcgtgcgtgcgtgcgtgcgtgcgtgcgtgtgtgcgtgtgtgcgtgcgtgcgtgcgtgtgtgtgtgtgtgtgtgtgtgtgtgtgtgtgtgtgtgtacatnnnnnnnnnnnnnnnnnnnntcccccagtgctgcgattaaaggcctggcttttcccactcttttcttaacagtgactgttgggtttgtttgtaatgaatgtcattgcctttattttcagcggctacaaagctagtatatctgatccatttcagagcatgccagtaaagcgcttgtctgtctggacccatgcatgatgcacgggtgcagacagggtgttactgaaatgaagaactcgctgcaaatgcataggaaacagcctctttaaaatgcaaagcaagaaagattgctaattctgcctggggctggggctgggggtgggagtaggggtctttgagggtgttttggctgctaagttaggcccctcacaggctgaggggatagggtgccagtggcaaagaaagcacagagaaaaagaagcaagaaggaggcagaatcgtgtgccaggttcatatttctatgagctcttctgggttggaaatttagaaggaagctttggaccaagtttatgggcttttaggacaccacagtatcttgaaatatttgtgctgaaatagccattgttgagccctgctgattcctgaccctgcttgcatcctggggtctcactcaggaagtagccccaggtcccatacacacagctgccagctcagctcccaacccccttccctctcctgggcttgccctgcccggtctgcacagcttgcttagggctcatgccagggtttttaaccttaaaacattagttttgtttgtgggaaagagggtttcaaatcaatgtgattattcctttcaggggcaaagaccctttttcgattctaaattctcaaatgagatttcagtactttggggattctacattcttcaaactcaatggagcgctaatgtttctgggactgtagtatttgcaatgaatggcttttgaaaatgttttgatgcttctgcaatgtttcgggtctcagagaccctttcctatggtactacctttccctgcacggttgctgcttagctcatgttgcgcctcctgacaggaagctagaaaccccaagaaaagattgggggtgaggtgggggacatggatgtaaagtgtgaagacctaggtctgatcctcacatactagtgaagaagacagatggggtggtgcatgcttgtgacccagtgtgaggccaagataggtggattctggggcaggctggccagccaacccagcctattggcaagctccaggtcagagaccttgtgtcatataacaaggtgatggagcctgagaaatatggtactggttcccacatttacatacacacacacactcacactcacacagagagagagagagagagaaacagacactcnnnnnnnnnnnnnnnnnnnnnnnnnnnnnnnnnnnnnnnnnnnnnnnnnnnnnnnnnnnnnnnnnnnnnnnnnnnnnnnnnnnnnnnnnnnnnnnnnnnnnnnnnnnnnnnnnnnnnnnnnnnnnnnnnnnnnnnnnnnnnnnnnnnnnnnnnnnnnnnnnnnnnnnnnnnnnnnnnnnnnnnnnnnnnnnnnnnnnnnnnnnnnnnnnnnnnnnnnnnnnnnnnnnnnnnnnnnnnnnnnnnnnnnnnnnnnnnnnnnnnnnnnnnnnnnnnnnnnnnnnnnnnnnnnnnnnnnnnnnnnnnnnnnnnnnnnnnnnnnnnnnnnnnnnnnnnncacacactcatacacactcacacacacaaaaacacactcacatacaaagacagacagacagacagacacaaacacatacacacacacacacacacacacacacacacacacacacacatacatactacatctgcccttggactgaaactagaattgtagggatttaatgccttcagtttgcacataccctgtctcccaagatgctcagaaactggtgagtgatctgagaagcctgcagcagctcatgggagaggctggggaagtagtgctgttactgtggtccataaggtaacattgtccagagggagaggagcatccagagcagtggtatggagggtaagcccgaagactatgctgagagacgtggcagatgacggatagttcctgcctgatgtaaccaggtggacgcggggatcttaaatacactggacatgagaatgtagggaacacagattgtgagtgtattattgctaagccaagttgttatgcctgtggaagttcacccagcttttgggccgttagctaaaagccagagttgagatgatggtggcacctggagggaaacagaagatcttagcatggagggagatcttagcatggagggtgaggaagggtgaggaaagctcatgtgaatgtgtgtgggggggcccttcctagggacaaataaggatggcagggtgttgcagtatcctttgaggagagcggtgtggccagaggaacacatggcacacccacctctgtacctcccctctcttctccgaggagggtcccatctgcgcttttctgggaaagaaccttggagaactggtcccccccaggactggtggtctgtgtcatttccttagctgactgttggagcagcctggattgcatggaactactgggtggtcctttcattttctccactgaagttgaagccatcagaaggcagtgggagcaaccttcccaacacagcagcataagttcaaggcttttccgagctcagtgcgccagcctctggggctccttaccctgcccatggtgtctctttccacgtgtgactcagcacggctggcctaggtgggctgacactaagcttccttaggtaaggaacaaacacgtcagactttcctcagaaacttcgtttggattctgtggggagacagagcaagttcgctaatcctttctcaacagcaggttggcccagagcaggttggtctcgggtagattgcttccttactccttagaatttaaaatgcagggaggggcatgttgattaaaatgagtcaaatgttgccctcatttcttggacattttttgctgctgtaatattggtgtttatgggagaattagctgtgatgaggtaaaagtctattttaaaaagctgaactcagtatagcattggaaatgtaaatgagttaaatacctaataaaaaatggaaaaaaaaaaagctgaactcagattgaaaaggctattttagcacttaattgctcagttccattatggtctctgtgtgtgtgtgtgcatgtgtgtgtgtgcatgtgtgtgcgtgtgtgtgcttcgaattcctgtgggttggcttataactggacttgagcagcttggattcctcagaggataccaaacccttccgaggaacacctcagttttaatgactatgagaatattcaagacattccccatctgagcaccattacttgtagtggtaaaacattttgaaaacacggctaagccattaactcatttttatggccaaatgaaagtgcctaatagacttagttctaagctgttcccccttcgttctcgaatgaaattgtccgttggcaactcattccgcagcggaactgaaggcctcatgatttcatccccaagatggcagattggtgaaaactcaccacccagcccggctagtttacactgctaatttgcctggcaaattcagtttcctagagttgacaggctgaaatcctttcattgcattgatgtaatacatacacacacacacacacacacacacacacacacacactcacacacatactcacatccagaagtgcatctagttgtatcatttaaggaatataactttcctttcattgagaagtgatttgcaaggggagtgtgtgtgtgtgtgtgtgtgtgtgtgtgtgtgtgtgtgtgttacatgtaaagaccagaggacaaacaactacaggtgctgtttttaggagacagtccctcattggccggtatacagctcaccacgtaggctagactgatttgccagcactgacattacaaatgcatgccaccatgcccagatttttctgcatagttctgggtgatcattcttgggtcttcacgcttgctaagtgtcttagtcattctattattctgaagagacaaaataactacagcaacccttatgaaagaaagcatttaattgatgcttacagtctcagagctttatcatcatggcaaggagcatagtggcacacaggtacacacagtgtggagaagtagctctgagttctgtcttggatccacaggcagccagcacaaagaatagatgggcctgacataggcttttaaaacctccgagggtagcacacttcctccaacaaagccacacctactccaacaaggccacacctcctaatccttctctgcctcacactgggtcacaagcatgcaccaccccatctgtcttcttcaactaggatgtgaggatcagacctaggtcttcatgctttacatccatgtcccccacctcacccccaatcttttcttggggtttctagcttcctgtcaggaggcgcaacatgagctaagcagcaatggtgcagggaaaggtagtaccataggaaaggttctctgagacccgaagacccgaaacattgcagaagcatcaaaacattttcaaaagccattgcaaatactacagtcccagaaacattagcgctgcaaagtgctgaaatctctcttgtgaatttaaaatcaaaaaagtttgtgaggccgagatgggtggattctggggcaggctggccagccaacccaacctacttggcaagctccaggtcagagaccctgtgtcatataacaaggtgatggatcctgagagacgtcatactgagttccacatttacacacagatacactcactggtgactaagcattcaaatatatgagcctacgggcaccattattattcagatcatcacacgaggcaaacactaacctaagaagcatattttgtttgtttgattttttttgttgttgcgtttacaaccacctattattttgcatcccatatgttttaggttaaagcaaatggaagctggtagtttaattaacttgcaattctgaacagcaaggtgttataaatgaaatgtacagaataaggaaggatctactgttatcaataagaaaagaagaatctctattgagtatcagacttatcaagatgagaccctttcatcggacagctcctgggatgcaggcagaggagccaagatgtcctggccttatagcatagtgtagggacgcctccataacagggacagccactgccctcccagtggtcccactgacactctgaatcgtgtcgatcaccttggcaagtacaccgtccctactgctttcccaaaactgcatcttgtccttggggtatccagcccgcccaccagaacttgtccacttttctccagcctcctgaggatgtttcggcatggaagtgaactttcttttctttaacttctaaaggtcccacaatggagtggactgaaacaagctgacaatgggcatagtctcaggaggtgagacaggtacctttcattaatgggaagtgtaccagtcaggccaagtatggcagcccaaggagggtcaggtggtgaaagcttaactatcttctctgtggggaagaggaatgtgggagctgccatgtactttgatagaaagcaaagtgattctcaggaaagacaaatagtctaaaacatagacaatagttcggactacgtgcctggctgtggagggtggtgtcaattctgttcttccttcctgcatgttaattacatggaggacatgtggagaaaaagaagggaacctcagaaaagtccctttctgtgcagggaggtgggggacaagaggaagtggtgggaagaaggtcagagaatcctttatcctcctctggttcagagcacacagcaggcagaatatctgcgttcagatgcttgcttgtagacctcggcaaaatcagacacgggtgttaccaccggtcttaccagacttaaggcaaagcaaggtagtgaggtaacagtgcacacaaaggcactgtccttagagttgggaggtcagatcccaattgtacctttgcctcagtcctgggcgagtctgtgtgtgtgtgtgtgtgtgtgtgtgtgtgtgtgtgcatgcacgtgtacagttcccagatgtccacattttataagccagtaaaacttcaagataaactctagggaggaaagatatgacagtcaccttcaatctgtaaaataaatcaaaacagaaatatagatgtgtgtggttagtgttggctctctgaatggttcctgttgtagcctttgcttttctcatttactttggggaaaccaaagtttgggaacctgttgcgcgcgctcaagtgccaggaagaacgacgctgctacaggatccttctgcacacgtttattcagtcctgattcttcttgtttatatctctcttgtttatatctcccttgtttatatatctcccttgtttttatatctcccttgtttatatctcccttgtttttatatctcccctgtttatatctccctcctaatagtaatcctctctcgaataataatcctccctctagcctgggcctctcactcttttatactctctctcatccacgaaccgcaggccacgccccctcgccagtcacgaggcttcagctaatcagggcagcaggggcaaatctccaccaaattggattcatctgtatcctggtacacctgcgcagcactcaagatgtttgtgtcttatatgaggaagtcaggtgcaagtcatatgacttagctgcagtccctggcgcctttgggactgccgccacacccgctccccacaataacccctagacaaagtattgagtgtctgccaggcctctgctctaggtgctaggaatgcgatgaggtgttaaaacagcagctctgcccccagaatgctcacctcacatccagaaaaggccatgagaaagcatgtgatttgggtcctgagctgtgtcccaggctgcacatagcttcgcaagggaccaaagaggagcaactagctcgaaggcatagggtttgtttaggttgcaatgaggccagaagtcagcatgatttggggtttcttcccaagaaggcagaccttcccctcacagccgttctttctcttttctttcataacccactgagtgcagttagtgctgctcatatacatatgggtgtaggaccatccacaggaaggaacatggtcaacttaccaggagctacacttctaaggaagctgcctttcctggaagccaccagctatcactaactcctaagctggggagcggggactttgagttgaggttgtaatggtttctacttcacatattggttgtgaaagtttaagcatgagggggcacgaaatattgtcaccacctacaggcgagtgtgagagtgaagcaggaagagacacgtgcaaagaccctggggcaatgaggaaagggtatggaaaggattgcttgtggctagagtgaagggagcaggtagaaggaaaaaaggacagaagaagcaagcaaaggccaggatttctgtgtccagggcatgcattttggtgcctgttgccctacagatagtgagtatacatgggaacttatgaaggcttacgttcagaacggttgtgcagtgagcagcgtggagatgaatgggaagggtaaagacggactaagcttgggacagttggactccacgctctttgcggggcacagataagccctactgatgagcttcagtcagtagaacagtgtgcaaagcttctgaattcccactcaggacgttcctgtcaggggagaactgggcctgctcagtcagcaggcatgggagagacacgtctaacagggagtacacacccttggaagacaggaacatgtcataacttacaatgttatgtctttaaaaggggacaccctgttacttctgtgacagggaacaaagtgtgagattgtgatacttgacatctgggctcctggctttaatccatggacagaactcatgtcttttgtcctctaaattaagatactgaaaaagaggctccagtgttaatgcgcagtgccttcttggagaatttgagatgcactgagactgcagaccaggaagtccagactccatctgaagtgcctaagaatggaacacttgctatctccaacgtcatggcattctactatgtaaaatgagcctcgtacaagcttatgctaaagattaatgtgcctagatacatcattgacacagatgtggtgtcacaggaatatataccattcatatgaatatatgtatactggtttatttatggcttatgagtacactaaagctatatccttcataacttttaattcccaaaatatgcagctacagatgatgtgagtctttgattcttaaagtcttagcaccaaaagaccaaataaataccctagattcaagacaactgtggttcattcaaagtgctagcaaataccaccctttctgatggaagcactgacgagttcctgccttagatgtttcaaaacacaaaacaaaacaaaacaaaacaaaacaaaacaaaacaaaacagataaaataaaataaaataaactgttgtaaaacaaactcttttaagaccaccattttcttctctccctctgcccttggttactctgagtccttgcagagtgctagaaagtggttcggtataggaattcattttacacatcgtcataattttaagagaaagtcttcaaggtgattttataaaatattcatcttctgaaaattgagcatggagatgttggtatacatggttcacgggtcacatttcccatagcccgtttgcagaaaaccaatagcgtttgcttgtatttgctacatgtctgttactgtgataagatactatgaccagaagcaagttacagatttatgtttccagaggagtaaaagccagttatgatggggccatggcagaggcgcaggaagctggggatgtcgccctcagctgccagcatgaaggcagggagacccgattggaactagggtgaggctatgaactctcaaaagctcacccccaatgatgtagttcctcccagcattcctgtgctacctccctaaacagtgtcaccgacaggggaccaaacattcaaatacataagtgtatgggtgacagttcaccttctaaccactgactatatcccttaaactacaggcacagctttttaaaaacaagccacgattgcttgcatttggctttatattctgggaagaccgctaatgctggcacttaaacttttttcttccaaaccaaagtagaattgcaaagtaagtgtgtgtgtgtgtgtgtgtgtgtgtgtgtgtgtgtgtgtgtatgtgtgcgtgtgtgtgcatgtgcacgcacacatgtattaattttctcctttttgaaactgaaaatgttagcagtgaataatttctcttggaaagttgtggattttccactgagtgataatagagccagttctgtaaatgtcagttgaactgagagccaagaaagtgataatataaaaagaaattgtatatccaaaattgccagcccttaatgatgatgcttcccaagtcaggaacatgcaagttatctttacagacaccagcatgaccagaagaacaccatgtgttttgagtgtttggagacatttaggccagtaacccactttgtacaccttttatttcccaatgcctaatatctcctagataaaaactcttcaacctatgttccccagatccctgtgtgagaagcagcttccttcttgagtgaaacagacttgtgtaggacatggtgccccatttggttcatgtcttctttgaatttctgaagactataatcttctacatgccactgagcagagctgatgtagaacaagcacatttagtgtccaatagaagctggagagtctctccatcgaaaagtaatatatgtctgtaataacatcgtaataatgtagattttcctcctgtccccaggcagggaaccctgcagagtatggtgtgctactctatctccaacagagaaatgagcttggactttgctttctaagattttcaaagtcaagcgtgagactctcaaagtcatttgccagttatccatttttaaacctttcttctgctgtcaaccagtgtgaacataaacataggttcttgcacgttgtcataaaaattgaataaatgaagtatgggaaagcttataaacaaatagttggcactccgtaaagtgctgcagttcttcataagtaccaggtgcatgctgttattcataagtaccaggtatacatttctctctcttcataagaaccaggtacaaatcactctttccacatattgatggataatcaatgaccacctttgagcacttttgatgtgtcaggttgtgcttatggactgaaagctagattcaactcctaggtgaacgccaggctatgagtcgtctgggtatcacctgcctttgagatcatggctttcctctctgcatgccccgtgcatgagggtgcccaacatagccttcatcagttcttgaagggcagttacgaatggtggcctattttctgtaaaaccaaagcacaagaacgaattgtagtcacgttgttctcctatgacctcttttaggaaaaaggttccctcggggggcacggtggaccttctgcattgctgtgttctcagtgatgtcagcccctgcagctgggcaggaatgacaagcagacggcaagtcatagaaggagggcggccattaagtcaccgaatagaatgtgcaaaccagatttcccagctctgcagagcatacccctggactgcccgagcaggcagctctgccacccatatgtctactctgccacagcaactgtgactcagtgtgtcctcagatgtcctctttgaagcagctaccctgagccagaggggaatcttccttgtcttcacttgctcttagccataatgtctatatttaaccactgtgatcctcatagttttattttttgaatactgaatcctgaaagggactatttttatttcccgctcttttattctgcaaaagctcacatgcgaaatgccttctctagctacttgcccaatagactcaccttcgtgtcctgcttgcttctctaccttcatgcgcctgatgagccctttgttcacacgtgaatatgtcagcatctgaatccttcagcaggttataaatgttattctcttattgaatggcataaagtatgtctaacttcaagtattagtctatcttaaataaactatctctgtagtattgtggtgcgatcacgtgatcgatcagtgtgatcatgaaggagctgtttgaacagattggagaggccttggtatgaaggatttagatgaggggcctttctaaatggagatcagggttcagtttttaaaagatatcatattcaaggtcctggttttgattctggatatgtgaataataaataaataaataaataaataaataaataacaaatacatagatgagtctactttatgaccatctacctgatgcaccagttctcttgtttgacttgtgtaaatgagaataaaatctcagatattattgaccaagataaaacattacaggcaccccatcttttccccatgaagaagacgagatgaaatatttctatagaaacttaggtatattgcattgggtttgaaaatcatgcttccaaggccccataaaaaacagtgttaacccctaatagtgcatcacgcctccaagtcattgtttctgaaatgagaccccacacatctagaatcccaaatgttccaagtaactcaccctggctgttgttagaactgtgttctaaaatatttgccataattaaccaaccatctcaaataaccctatgaagagttagacttttacagttagcatttggagatatctccacatttgtttgtttggggcttttataaatttcaaaggtttggcatatttcccatgtctggattctggcaggacagtcatatataaaacagttgttcagtaggaaggtgaatctgagatatattcatcacagcaaagtaggaaagttagcaatatttaacttccattaagttattaggtacgaaagccagcctactattaaatgaatcatcttcctgtaagaactggaattgctcattagaatgcggtctaagagggctcgagaataccgcctcatacaggatggagtctaccaatcttgagctttacatctggcagaatttgcggttcatggggcgtgctcagatatgttttcacaggaaatgtgcatagaggcaggggatgaaagtcagaatggcagacaggataaggaagatgtttcttcagaagagagaattatagagcattcctccattggtcttctctgggagaactgcatgcaccctaccaaacttatcttctaggagaaagtcctgagtgcatctgaaggctgttagggtaatcatgatgcaggtggtaatggcactaagtaccgtcatcatctataaagcagaggtaggtgaagacctctaaagagctcaggccctgacctgctttcagccacataaatatgttgaatgaatgggatgtgtgagtgactgtcctccctcagggacagttaatgtctaggagtgagagctgtagaaagtttgctgtttacttcaagaagtaactcgtaactgttctctccatttttggttgaggactgtggacatgcagcagagttgtatttctctggtggttatacctgcatttatacatgtctcaaactactatttctttcctttaaaaccttttttttagttttatttatactattattttatgtggatgagtgttttgcctgtgtgtatgtatgtatataccatatgcatgcctgatagccatggaagttgaaagagggcctcagattccctggaactggagttgcaggcctttatgaatcaacatgtggatgctggacaacatcaaaacatgtcctctgcaagaacaacaaggactcttaatccctgtgccaattctccaggcccttgggctgctgtctcattgagaatggcttttttgataatatgactttcatttcttgtaaaattgtaattactgttctctctctccccccccccctctctctatgtgtgtgtgtgtgtgtgtgtgtgtgtatgcatgctctcatatgtagaagtcagatgacatcttagcaagtggatggagttggttctttccttctactgtgtaggatctaagaattgaactcaggttgtcaggcataccagcaattgtctttccttttctttaccagactaaggtgggaagatcgtgagttcaaggacaatatggactagagagcaagaccctggaaatttgggctacctagcatgtcagagcgagatggtaggaggagggaagaggaagaaaggaaggaagaaaggaaggaaggaaggaaggaaggaaggaaggaaggaaggaaggaaggaaggaaggaaggaaggaaggggaaaaagaatacaaaagagaagaagaaaagaaaccctggccactcgtgcagatatattttaacaacaccctctctgtcatacttgcccaatgatgtgttctataccagcaggaaacaaagggagccagagatagcaggtatatggttactgggcttgtaaaagaaaaaggggatattttatagcaatagccaaattctgcttcaaaggtgcttaatttctaagaggatactcacttcattttttttagtgaatgtgatgcagggtgcaagtgtgttcttcagaggcctgtgacacacacttccatcgctgccgtgctttggggcaacccccgtcagagatagatacttctcgctcagcagctcggggatgagctgcgaggcaatggttctgagtaagcttttcacatccctgatggtgtttgcctttgtgttgtcttccctaggtttgctggcatgggaaacttgctcaaagtcctgacccgggaaattgagaattatccacacttcttcctggattttgaaagtaagttccaagctctataacacaagaatggaaacttcgtgtttgctttgtagcttgtttatagggaagttatagagattttgtatgagacgcaaaccaaatcccaatggtcttatgcatttatttcttcctgacattgttcctgaaccattttcttccaccatttctttacgagctttagaaacttaaggaaggtttattttaattggtccatgattttccttgatttcaaaatgattagctctggtaggatatacataaatcttatcgtgactcttccctaagatttggtatatagtagtatttcacattctaaagaaaaatggcaagcacattaactgatatggcttagcattaaatatcattatacatgtaaggaaaacaagagaccaccaccaaaaaccagacttattatttctcatcatcactatctattttatatattatttgattgtgtaaagttattttgggattttttaatatgttcatacgcattttgtccaaagggttattgcctgggtttttattgtcaacttagcacaatctagaattcccctattttttcttttaatatggattccagatcatggggctagtcttcttgttttaaactacaacccacgatagccaggacaactagatatctcttttttattcacatctactgcaagctttaacatgtttgaaattttaatttgtcaagtatttatttatattaaagaaaatggtcagaacatcttcacatatagattaaactttctagcagttttgttaattaaatcctagaagacctttccaagttgtacagtgaacgttctctacaggtgttgtgtgctgtctttgaaaatatctccagaatgtctcatgaattctgataactaaacttagtcatgtttattgaaatatagttcacttctgatctaactcaattccttcctattgttacattttgacttggttaggtttaacatgatttcatttccactaggtttgataaagatttcaactcaagaagtgaatttatctgtgattcttccgaaatctttgtctatctttatgtatatatgtgtacacacatgtgtgaatatatcattgttaaagtgagattcatcaataatagcctttaataagttatttataatcttaaccaccttactttgttactttaaccattctgttccacttttataacatgcattttgcattgttaattcaatgtatacagtagttaaagataatgttaaagaccccattcactcacagtttaagaacttctaaaacccagagtaattccatgtcctttcttgctctgaagccctaaatgccacatacatctgctctgactcccacctacctactagaattcagtggccaccactgcttgtctaattgtcctggtttttttttttttttttttggctttctgcactgccaccaatgttgagttacttgtcagggttaatcttcagaaccttgaaagagtgcaaataacacctgcaagaatttaaaacagttgtttccatctgctcctcctgtgggctcagaggtttgccttggaaagcccctcctgcaagaggcgtggccttttccctatagtaactgtattgtgatctgctcagacacatgctttggaaacttttgtactatttaaggaaaggtgctgggagctacatcatatatttggggagatggatatttgatgcccatgatacaaacactctgcttacagatattctattttttttttcaagactagaaaagaagcactggatctctgtgcctgatggctttcttttaggactataaaagtactctagaaataacatataaatttagaaaaatgtacaaatttctgcttctttttccatgaagaaaataaatcgaaaccccttttgtattctctgggaggttagttttatttccctaaactctaggagggtacttaactgagctgaaatcacacagggaatgacaaggaaggtgatatgggaatgtgggtccctctagctctccctttctgttttgttgttcccaagtgctcatcacaacaacttctttgatgtgtcctaccatcattctactcctcactagaaaaaacacgtcttattcctcaacaaactaaacacatctcatgaaaatgcaaaacaaagaaacaaacaaacacattctctttatcctaaatatccccaccctcacatccccaccctgagacagggtttctctgcatagcctttgctgtcctggaactgactctgtaaaccaagttagcctggaactcagagatcaacctggctctgcctcccaagtactggtattaaaggaatgcaccaccatcacccttggcttaaatattctatttcttatggaggttttcaagaaagaacaatgattagttaatggaagatgtcttcaggaaggattttcccttgagtctgtgagttgcagtctaatcaagaaagggtatattgagtataatatgacattcatgtcagccacacacctgcagaatgtgaaactagatgagaactgatgtggaaaactagatagacatttagttgaagacaaactaggagactttagaaaggcataacatgccaccagaggacagaagggaatggaacttgcaccttgttctagaattggagggccatagaaggaataggatgcatattgcaacaggtggcattttaataggctttaaagaatgacaagttttttctgcaggcacagatggggtgaagagttatgcaacagatggaaacagtatgatgaaaggcacagagattagaatagaaaggatgggtttgaagaacagcaagagacccagtttagacagagcaccaaaagcctgttgggaaaaggggagggcgggaggcttgaatggaagactagttgggttagatgttaatgagtacagttgttaagtgaaagcaggaggcccataattggagcgctcatccaaacagaagagctaaaatcccttcgggaaacgggacaacagatgagagctgaatagatgagaagttcaggacctgcactgaacgagacttgagtggggacagggtcctggaaagatgctacagtagaaagatagaaggatattctttgagattcctggggtcagagcctgagccctactctttcatgacctagcaactagccttatgttgagcatgggggttgagtatcacatcagcatcaggggtagatgatggtcttgttaaagaagaacgcaacaggccaaatgtaggcactggggaaaacatagggagtgcaaatgggtccaagtacagacacacagaaatcaaggaagagaaccatttaaatggaagatgatggttgagtagtcaggtgtcaccagtcaccttgggaaagaacttttgagacttgttttctatctagaggctgggtggtaaagagttaaggagtgaagggtgcagagaggaggccggctgagctgcatgtagtaacagcttaaatgaatctagcacatctacctccagtgttgaagattctttttgaagtcagtgatgggatataattgaactgggtcaaagagacataattaagctgggtcaaaacataatacaaaattagatacatgtgtccttgagctcctcggtggcaaagatctgatttaaattcctgttgacctttgcagtgagttctccactttatgctaatattttcccacagaccctccatatcttttttcattgtttatttcatcctttgcgctctctctctctctctctctctctctctctctctctctctctctctctctctctctctctctctccctctctgccttctcactatgcctccatttcctctttgaaagccaggaggcaggcgtgtggtggggaagatgaatcaatgttgtttcagtgagtgatggtttgaaggacattgcacaagaagtatgcctgaaaccctatgtcagatggctcagttgaagcctccacattagcccctaaggttgacaacaggcctcagccttacacataagtagttacagtaactgccaggctgcagtgattagaaccatctgatgagctctcttttatagaggtagctaagcttctcaccaaaaatctgactcagaggtccagtccataaggatctgttctggatgcttctgataatcagccagtttgataaccttctttaactaatgcatccagttagtcaccattgtgattgatagcaggggaactacatcaagcaagcttttaagttttgagcaatattctccaagacagtagaagttcaagtagcttagcaaggcataatggttacataactgtgaccttagaactcaggaattagaagaaagaatattgtgagtttgaggcaaattgagactttatacagtaaatttagggacagcctaagttacatagtaacactctgtctcacacacacacacacacacacacacacacacacacacacacacacacatatatttatgcacatccccaaaacaacaatcattaataataataattaactattttaaactattcaagagcaactcacttggaaggaagtttttgtctaccaataaacaatttgatctatcaagcaaaatgctctgagatctgagcagacattttttcagtgaagataagaatccatgggaaaggaatactcaatattattaactaggaaagaaatccaaggtagaactaccacaagagaatacccactagggtggggagatgataaaagtcctcatgagattacgaagaaattagaagcctcgggcaagtagggaaacaaaatggcagttctctgcgttgaaagagattttgaagagcctcaaggtcaaggctcaagttactgtatgattggactgttgctgtgtgtgcccaataaaatgaaaacgtacataaacttgtatttgagtactacatgtgacattattcataatagctcagaaataaagcccaaatgctcatgaactgatgaataggcaaataaaatatggtagcgactcaatgaaatatcagtagtaagagagccagttactgaaacatgctataatatagacagaccagctgttctggtggtgccttgtagatggttgctccctgcctcgctgattcagctccgtttctcccatgtgggctcctgtagacacggtgccttgactgtgcttcagaggccgcatgccttggctcccatgatcccacagaatgcttgctcccttgggcggtcacagctttggtctctcatagggcacagagtgtgggagtatttaaaacctgagctttccattgtgccttcaggtagacccagggctccacagccagggtatcttcttatgttttatatcctgctctcaggttttcttgtcattgttgttcattgcaccatgctagcaagatgacaccaatttccattctgtcatgaactcctaggatttcttgttttccaggccagtatctgcacgtgtgaatattttaacttgaatatttccattatttgcttgttacttacctctgtggaaacttccttttcttgcctcccctctgctaaacctgaaagcaccccccccaaccccgcattgtctagaacagttgtcttacttttaagattatatgtcagtcaacacacagcctcagctcttataataaaaatcacaaaggcttggcttgtatactatgcgacttgttctcttctttagaaagaaagcaatgttctttgtggttttttgtctatagcagtatgaagatttgttagagcgctatggatttctatacaacataattgacattaatttttgaatcctagaatataaagttagcacagtgagatttccttgatgtcctgaaattaaaaatttaacaggcttttgactaatcaaggtggaaactgattcacacatagatttaattactttgaatttttttgatatttgctgttctaccatgagttctatcatcttaccagatttttaattttacaattcactgtttttaactagcccaagccttgcagcctacacctagaacagactcattttgcataacagacgctgcaactctgctaattagcagctatggtgcccaccccgcagtgcccctgatgctactctattctctgcatctatcagttgacagttttatgtacttctcccaagtgagatcacacagtgtgcatctttctgtaactggcttacttcaaggaatgtaacatcttcaaggttcatccatatttttgtgtattgcaggatatctttatgaaagctgaataccacactgtacttgtatttatgcaacgttttcattctctgtccattttaaatggaagcagaatgactgccttatagttattgcaatccagtgtttcaagcaatcttgaaaggtactctgggtaccagccactcttagttgtggtgtgactgactgaagatcttgaattgcagtctggttgggaagcagacacagaagctgccatctgggatgtagcgtcggttcaggcattgtgtgacacattgtcagcaactgcacaatgtaggtttctgctgctgctgtatattaacctcatcactaatgtttgattttttttttttttttgagatgaagattcatagaaaatcaggtcttagactgttgtcttaccctgtgtctgccatcttgttgagcatgaaatataatttcagtagttttggtgcacactagttgagtggccatgtgcaaaggatccttccatttttaaggaggctgcagttatgatggtgagtttttgctgggggcaaagagacctgggaagataaggtgtgccatattattgtgagagtagaaggactgatcccttcctggtggcattttgtatttcattgggaaaataagatatgaacagaagagagacaatagtgcaggaattaggtacatctcaaacagagatcaaatactgtactagccagaagagcgtatcctaaattaggctaaagaaaaactctttaatagagaggggctaagtaaaatggaggagccagagaaagaggttctgcagaaaagagcacatattgttctcgcagaagacctacgttcagttgcctgcaccaacactggggggcgcataaccacatgtaattcctctctagaggaaacagtgcccctggcctccaagagcaactgcacacaagtgcacatatcccccaacatacacacatctacataatcagaaattaaacataaatctctaaaaatgatcttcttatgagacaaattcatgtctcataaatgaatccaggaatactagtagtgtgtagggagtgattgctaaggaaatgataaaagtcaccccatcactgtacttacaaaaggcttcagtctcctcttcgtgggaacaatggtttgtatcaggttagtctgtcatctgggttgcctttgaggacttgggttcacttcctgccgcaactgatctcttctttcatgtgtcatctgccaattttgcgtctgctaaagtggctcagaggaggctggagaatctggaagaggtgaatttttttttttttattggatgaccaaatgtctttttctagtccaaacatcttttacttgacaaaggagaaagataaaaataaaaacagagtcaaccggcaaagcagtttatgaatccaacacaagtcctcaaaaacaaagatgctctaagaggacctggagaagtggtctgctgggtaaagtatttgtcatgcaagtgcgaggacctgaatttggatcctccagactcatgtaaagctgcatatagtgatgcaggtctgtgaccccagtgctcctcatctggagataggaagctcacaggctgccaagcctgtgcacacaatgaaaacaagagaccctctcaaagaaggtgaaataaggactgtcactgacgttgtcctgctgcctctgtgcatatgtgcctatacttacacacacacacacacacacacacacacacacacacgtatacacacgtacacacccatacacacatgcattcttaaatatgcaaaaacacagaaagatttttttagttcctatacttacacacacacacacacacacatacacgtacatacacatgtacacacacccatacacacatgcattcttacatatacacaaacacagagagattatttttagttcttatacttacccatacacacacatacacacacacatgtacacacacatatatacacgtacataaacatgtacacacacccatacacacatgcattcttacatatacacaaacacagagatttttttttaattgcatagtattctagcactccaactttctaagacttttaaccttgtctaaatttcctctacatcccttcaggtaggaaaaagacagggctattattaacttctctttctaggcccaagatctaatctggagcttagagaggtgagctggcttgccctgagggacgtattcaatgagtgttaagttggcataggatttgatctcaaaacagccttaaagtaccacctccacctaggaatcctagcgtgacaaaatagacaacccttcaccatccttcaccggctcggccctgttcagtccctggggtgattgttccatggaaagatctttgggctctggtgtgtgatgactaatgtcctgtccaaacaaatgtgtcagcctggtcccacttatattttccaatgaacttttgcaatttcatggtgcttccgtaaacaatatcttactataggttattaccattaaacattcccaaagttaacaccaggtaattatttatgtctcttagtttattcagaaggcagggggagttatgagagtaaggaagtgggtggggagaggggctgcagatttaatttatggcttgggcaaatcctttctgctgttcctcactcaagtgtttacccagcagtcatcggggcacggagatagtcatacatcctcatgatgaaatgccagggatgccttcaagaccaaagacatctcataaattgtgtcttctcctcagattattttagtttaatttgcttctccgtcagattgtccttacaggcctaagtaggctgtggggaaaaggggtgcctgtccctactgcctttgaagacaggataaggccctggctgatttatacagataaggtcttttgctttgacagcctctctctagtttgaggcctgctgttgttccctgtagctttactgaaaatctctctgaaaaacaaaggcacctacttccttccccattagcacagaagaatgccaagcatgcggctttgaacagagtatcagagtcctccacagggataccttccacctagcctctagtgacacccaaaatattggcagttagcatgcaccatcagcactggcaatttcagccaaaggaggagaggttcgtatattcccttcctgcgaacaaaattaannnnnnnnnnnnnnnnnnnntcagtctcctcttcgtgggaacaatggtttgtatcaggttagtctgtcatctgggttgcctttgaggacttgggttcacttcctgccgcaactgatctcttctttcatgtgtcatctgccaattttgcgtctgctaaagtggctcagaggaggctggagaatctggaagaggtgaatttttttttttattggatgaccaaatgtctttttctagtccaaacatcttttacttgacaaaggagaaagataaaaataaaaacagagtcaaccggcaaagccgtttatgaatccaacacaagtcctcaaaaacaaagatgctctaagaggacctggagaagtggtctgcctggtaaagtatttgtcatgcaagtgcgaggacctgaatttggatcctccaaactcatgtaaagctgcatatggtgatgcaggtctgtgaccccagtgctcctcatctggagataggaagctcacaggctgccaagcctgtgcacacaatgaaaacaagagaccctctcaaagaaggtgaaataaggactgtcactgacgttgtcctgctgcctctgtgcatatgtgcctatacttacacacacacacacacacacacacacacacacacacacacacgtatacacacgtacacacccatacacacatgcattcttaaatatgcaaaaacacagaaagatttttttagttcctatacttacacacacacacacacacacacacacatatacacgtacatacacatgtacacacacccatacacacatgcattcttacatatacacaaacacggagattttttttttaattgcatagtattctagcactccaactttctaagacttttaaccttgtctaaatttcctctacatcccttcaggtaggaaaaagacagggctattattaacttctctttctaggcccaagatctaatctggagcttagagaggtgagctggcttgccctgagggccgtattcaatgagtgttaaattggcataggatttgatctcaaaacagccttaaagtaccacctccacctaggaatcctagcgtgacaaaatagacaacccttcaccatccttcaccggctcggccctgttcagtccctggggtgattgttccatggaaagatctttgggctctggtgtgtgatgactaatgtcctgtccaaacaaatgtgtcagcctggtcccacttatattttccaatgaacttttgcaatttcatggtgcttccgtaaacaatatcttactataggttattaccattaaacattcccaaagttaacaccaggtaattatttatgtctcttagtttattcagaaggcagggggagnnnnnnnnnnnnnnnnnnnncactcaaagtgtttacccagcagtcatcgggggcacggaagatagtcatacatcctcatgatgaaatgccagggatgccttcaagaccaaagacatctcataaattgtgtcttctcctcagattattttagtttaatttgcttctccgtcagattgtccttacaggcctaagtagggaaaaggggtgcctgtccctactgcctttgaagacaggataaggccgtggctgatttatacagataaggtcttttgctttgacagcctctctctagtttgaggcctgctgttgttccctgtagctttactgaaaatctctctgaaaaacaaaggcacctacttccttccccattagcacagaggaatgccaagcatgcggctttgaacagagtatcagagtcctccacagggataccttccacccagcctctagtgacacccaaaatattggcagttagcatgcactatcagcactggcaattacagtcaaaggaggagaggttcgtatattcccttcctgcgaacaaaattaatatcctgcatcctaactgataaaagggtggtttatctattgaaaattgcagacacgtggaattcagtgggttcttgacaacaaacgtgggtgtgtaaggtcacaacatatatgatctgtttccacactttccacagcagcgagtccaagatgagccttaaatcatcgcctcaataatggctaggatacaggtgttccgggcctcctcggagtattggtttctgaaattgcctgtgtaaatcacaaggacttttacagctccattgtcaggcaggatgagcactcacttcatgtagccattcttctccggtcactaagataattgaagatgattagacatttagaatgtgagtcttagaagaaacatcaccaaaacaattcattggctacaattggaaataaaggcccaatgccatcgtgagtagtggtgtgaatgtgtatgtgaatccgtaggtgcatgtatatttgtgtatttttgaatatataggcatgtgtgtatatgtgaatatatatgcgtttatctattatgtatgagtacatgaatgtgacaaatgtgtgtgtgcaggtataccttttcataaaaagtcaagcttcatgttaaaattagaaaagcaaagaacatagttcagagttgatattcccttagcaaatgatgctctcaaggttgctggaggattatcacagtaaccttttccaccactaatttttcagggtctttttctagatgtcatttcttgacatataaaaattcaataaacttttaaattctggccaaagttgagtctgagtatgaggagggccaggagagtatccaaatcctttcacaacgttgtccccgaaagcaaggtgtggcagttacaggactgtaagagtagacctttgccagttttttattctcccaggcagaacagatgccccagtagcatgccagctgcacggaggcactgagcaatgggagagttaagcacaagtgttgaaggggagactcagtatggacccaggtgaatatgaatgtcttagtggcagacatggaacagtgtgcaatccggcatggggatggagcctttattccattgcttcctcttacccacattccaccacctggcacatccctcactgagtcactgttttcccacacatttattgagtatctctattagctatgatatcataagagtactgaagataagtgtgtaaaccctgtatccagatctcaaaactcgaagacaagcagccgtccatccccaaactgggctgcggtgcgggtgtagctcagttggtagagggcttgcctaacattcctgaagccctgggttccatccccagaattaccagggacgtggcacagacgtgtgaccctagcacttgggaggcagaagaaggatgattcaagacaatcattatgcatatgtgtatatatatacatacatacacatacatgtgtagtgagttcaaaaaaatcatcttgaaaagtatacacaaatcattctttcaactatcagacagcacatgttcatgagcatatattatatactaaccaggcatggtaatgtgcaatcaaatgaaataaatatggtcagagtcttgtttataatggataaaagtctcattaattctatctgctattattctacctgtgagatagaagtagtaagaatcatgggattccatgttgatttggaacaatgttaaatgtcacttggcgttacacagcaccttccccatttacataatgagataggcatgaagcaagacgcatgcagcatgcaagcatcgtccatacgcctttttaggtgacaacattgccacaaatgtcagaagtttggacacacctgaggttagcggtctctcagctgtctttctgcaccggagaagctggccccgctggtgacttggatcccctgaaaatattcctcattccagcccagaaggcatgatggcctgaggaaccgaactattggctgcggaaagagatgacttcaattccataacagggaaggtagaagaaatcaggtatcccatgagactaacaaattatggtagcaaatgtgccaacacggctccaagcgctggtgaaagagaatgagagactgagtttctgcactccatcccctaaccaggactatgcaaacattcctaatgggactccaggaaaactgccaaagggaattgtttcccagagaaggctggggactgaagatccatgtttacacatcctcacgctgccaagagagcggctctgtcaggtggaagggcctcacccaacaccccaagtcaccctcctgtggcgtagaaaggctgtcacccacgccactccacccccaagccactcaaggaaatacgttgtggtcacaagaatgttcatgtcagtttatataagaaagtgtcacttcacctgacatggagacaggagctggctgtcgcaggctgcagtaccacttggaggctactctgtaggatgtttattttgaaagcacttaagaaattcctctattttctacaaagtggtgtgaaagctttctccttttgtgttgcggtgatcaacaacaggatgctttttgggttttatctgttctctatcagagcccatttagttataactctatttcatatgagactcttcctggtgacttgttatgatggacccatgtgacgggagattccacgcgtcttctctccccttttaagtcaaccttcttccacaaacagttgtgtaattctgttgaattatctgaacctcagaatcttgggcacagtctctattttgcgtttctctaaatacgtcatttggagggttttgttatttgtttgtttgtttgtttgtttgtttgtttttaccttatatatacacagtacgttcctgaatttggataagtgagtctttcttgtttttttttctttgttttgttgtttttctattgtccattgtttaaatttcatatgtatgggtgttttgtctacacgtatgtttgtttctgtactatgtatgtgcctggcacccaaggaaaccaaagagggcatcagatcagttggaactggagttacagataataattagccactgtgtgagagctgggaatcaagcctaggtcctctggaggaacaaccagtgctctaaccactgagcaatctctccacccctcagtggctcatttttatttggtttgtagggtttttggtttggtttggtttggtttggtttgatttttttttcccttgggttttcctccctgccactattgcaatgtggaaacttccaagctacccccgacatgctctctgcagtgacaggcttcctagttcatagatgtgtaggctccctctttctgaaatccctattgctttgagaacaccttggggaagcaataagggacatatgaagtgattcaaattttcggaaacatcagtcctgatgatatttacccagtgtttgtgagatatactgggcgagacaggagaaattgggtattttccccgtggtatcctgagtcagcttctgatcacgccggacacctcttctccttctggcccatctgtgtttcttcctacctccaggaccttggctgccctgttctctccctgtagatgtacctcctctatctctcacctgtgccaccattctagacacctgccttctccagttccttcccaactgcattcatcatttcctaacttgcctgaacctcgtacctcctcataagtgacgttgtttcgtttcgagaaaacatttttcccagtgtccagaaatcctgtgagagtttataattttctgtgttattttcaggtgttactgctctttttcatatgtcagcttcacacatgcacataatacccacagtgtattatggtcataacacccccattatccttccttattcctttcccactgccattaacccctttagttctttccaagtagccccctcttagtatatgggttttcttttctttttgttgatttccatggaaaccaccagttactctgtctttggtagttgaatagactaggccgagactcaagtcgctgcgggtgtcatccctcatgggcttgactgcagctttcctgggcttatctggcatctactccccccttgcgctcagtctgctcacacactcagccagggctcgctttaccatcagccgccttataaagctattcctgccaccccagggtcccgctagtgactacgacatctcacatgtttggagtatctgcctttgtattgtagaaagattaaataaaatggaggttcggtcagaggagtgtcaggcttcatacaactttgtccttgtcactctgtcagtgaaatctgctgacaacatcctgtgtctcaggatttaaataccaggaaacagttccatgacctgatgtctctccctctctccctgagcagtgacatcattttacagaaactggcctgatcgcaattctgagggcagtgaaaggcatgtttcttcactgttggcctcctgccacagcctccttgaaatgcttctgggggttagaacctgcaagagctccagagatgccagagagtgagaactggctgcagagcttagacagcactgtgtggctatcagagagctgcctttgcttatgtgaacctaaacacatcacacacacttctgtgggtaacactgtcaagaccaaagataagcagaacaggccttttgacagcactctttaagtgtctttgctgaggaactcctgtgcacacctcctgtgtactcctgtggaccactgtcttctttcagactatcctctcccactctcatggattttcttttctgagagtattcccttgaaccgatgagtacacacttgccaggtcttgtatgggatgtataaatagattgggatgtcttggtgagttctggaatgatatgctgctgtcatgccgtcaaggattaatgacccaagatgaagatgatgatgtggtgatggtgatgaaattcatctattcgggagagggtgtgccatgacatacgtgtggaggtcagaggaggtcaggcgttggctctcctcctccactctgcgcttcctggcaattaaattcaggtcattaggcttggcagcaagtgcctttaccttctgagtcatcacaccctttccaaattatgtaagctttaaggttgatttgtatataaaaatatgtagataaatatataaaaataatatatgtaacaaaaatgtatatatatatacagaatataaatgtgtataagtataaaaatagataaatatataaaataaaataatatgaataaaaggggttccttttttaaaaaatttatactcaagtctgcaggttttcaatgatggaaatatcctgcactttttcctgttaaaaagcatacactacacagtgttttggctttgcaaggtcaggagggctatggagctgtgtggtgggggcaattcacacctttgtcagtacaactgctctctacacttaaaaatggctagggtggtacattttatatcgtatatttgacaacaatgagagtgatagttttaaggaagggtaaacaatgaaaagttcaataaaaagaagttgcccccccccaaacattcactccgcctgttacccaatgttcacataacatgtacagaaatgcagtttgtacaagttaattaataaatggacacttaggatgatctggtcatactaggtttcatgtgtacaaaaggatggttgagtgctctgaactaagtcctgggcagaagttgtattcattttctaatcctaacagcttgttatgttacaagggtgacttccaaagctgcagggagaactgatagcagtgatcgtgtactgcctttgagagctgtttgtaaacagcagcctctgtttctcttggtttctctgtcacttagatgcacagcctacagaaggagagcgagagatatggaaccagatcagtgctgtcctccaggattctgagagcatcctcacagacttacaggcttacaaaggggcaggaccagagatccgagatgtaagtccatgagaatattgaattgattaaacccttcgagaaggaaagttcttacacacacacagagagagagagagacagagacagagagacagagacagagatgcacatgtgtgatgattaagtaatagccttagtacttcctagagtgcaaagtagaataatgtgacatccgtgtttaaccaacaacaccagcagattggttcctgtaagggtaatattgacacaaagcccgtgaatctctgagtcatgagattcagggtaacatgtacaatcaaaactttgtgattccagtagtgtcacgtgacaaccagaaaccacctgctctaaggcgagtatcttgctcttgtcttctgagaaaaaactaaataaaaattaaataaataaataaataaataaataaataaataaataaataaaataatagccatacggagtgagacaaatggtcttcttcaaggacaagcacaccagttgtttaggagtgacagtgtatggattgagcaagttgtgtttatgtatttaggaagatgcatatatatgagaattatcctgcctctgccaccatcctcatgagagcataccactgtcaggatgctactgggaaaaggtctattaagatgtggcttgtctacttcagggttaccttaagtgtagatattactatagactggcaagaacagagtgtgtatcatagaacaagcacaacagctacagcctctactcctcataataaacagcctttagatgaatcaagtgctaatggagagagcaaagtctcttccattatatttttacccaagaacacagcaaagatgagacatgacctcctggggtcatgctttgtgctcaattgttgaaactgccttcagaaatgggctctttgggctctttcccaggtaaccactgtcaactgaggtggttctaattctcaaagcacaccagggattgcatattttaaactaaaatcattgagtgtgcttcaacatgggcttattgcttttcttaaagagaaaactccccaccaccccccttttctcctgtaggcaattcaaaatcccaatgacattcaacttcaggagaaggcttggaatgcagtgtgtcctctggtggtgaggctgaagaggttttacgaattctccatccgtcttggtgagtatacttacagttttcatggtccacatgggacttctttctttgccatttgagagtgtagaataaacagctctacgtgtccgaatatgtcccacagtcatggactgccattatatcttatgagataattcatgagcaatttctatcattcccgtttctttgaatctaccacatgctttctctggaagtgactgatgggcacactaaggccctctactggctcatgctctcttgatactttgtcactgtgcccatctgctcttcaaagcttactgatctcgtttcctagatatttatttctgttatacatgtgcatgtacgcctgtgtgcatttaggggcaccgtttgcatagaactttcagaagccagaagagggtgtcagatcccttgaaaaaagggggtacagatggttgtgagctgccctgagggttctgggaaccaaaccctggttgtcagcaggagcagtaagtgctcttaactgctgagccatcactccagccctggtctcagttttaataaaacctaaattggaggatagagtttatttaaagccacaatttcctcaccccctccaaaaaacttaattagcttaatataaaatgtaagaaaataaacctagcatttttactttagctttaaaaacaagtaaaactgtaaataggatggctactgaagctggggtgaaggcaaatgagattgacaaactggctgggtaccacgagcagtacggtgtgatcactgccaggacttggggttttatttgttcatatcgagtatctagaacggaaagggtagccatcaacttctgctttaatttaccactaaaacaagtgccacattgtaagaggaaacccaaagttaaaatcatcactgggatattgataagattcaatgttcagaccagctaagggagtgacgcaaacagatttcacaagcaaagaaggttgcctcaggctctcaggtagaagagaactcaaattctgtttcctcaatgtgcatctgaaaggagtgagctgaaattccaagaaactggattctacctcaacagacagagaaaggtgcatccgtcaaagcaggctagggtataccttgttgcccctgaagatgatgtgtttccattggtgggatgcctaacaaagtcttgagacagtccctgtaaggatactaaaggcttatgagaacatcaaaacagtgatgtcaaattttcctgtaatatgttagacagtagatatatttatcttgttagctgctctgactttactagagtttacatcatagtaccaacaccagtgtagctctactcagtacaggaagggattagtgcatataccttttaaataaaactttattgattaaaaaagaaaacagtgatccagatttagcctatgggtcatagcttatcaactcctgctatagagaattatttaaatgactctgctgttagaaataacatgaaagcaaagggagtggagaatgatcagaaatgagcaaatgagagggatgagaattttcttagaacagtaactaaagtaaacatggtggtagatttgtaggtaaatatcctggaagtataggaacggagaagcccgtgacaagaagagaagaattcccagtgttaaagaggtgacataacccatgtgttgaggactcatatatggagacagggccgaaacaggcaccagtgtctgcttctgtagctcactgactggctaaactgcctggccccaaagagctctgactcttctgcctctgtcctcattcccacctccaaagctagagttacatgcctgcaccccaatacttgggggattcttgtgggtgctatagatgtaaatgagatccactcgttggcacagcagacactttgatgatgccaccttctcacccactcatctggtctggaatcattaggggctatcaatcatataaacaccatacatttattcctggttttctaaaaggctcaggagttgagactactaagtgaaccgagctttggggtagccacacaggttatgtctgagaatgtcaacttgaactcagcactactcttaaaggatgcttctggtccacctaaaatatatctctatctctctttccccttggctttcagaaaaagcacttcagagtttattggaatctctgacgtgtccaccctatacaccaacccagcacctggaacgggagcaagccctcgcaaaggaatttgcagaaatcttacattttacccttcgattcgatgagctgaaggtcaggacgctcacatcctgtgaaagttcacctgggtaccactgctttatggctgtgctgccaaggctgtggagtgggtttggaagagtaagatgtaaaaccttcccaaggaggctgatcatgtggtgaacagttgcagtctgtgtggtcagagtagtctaagagggtgccttacatgtggaaattcgggatctgtcaagcaagtggagggaaaacccttactaagtgtctctttctcaccaggcaaacaagttttccctaaatacagcccagagtaagaacagtacatatttcagaacactggcgttataagctcttatttttaactgttactccggtttttagatgacagagaaaattcctgccatgtttatctgagatcctgatgttgctctcttcctgtctctaggagctaaccttctttcctctctcctgaatttcagatgaggaaccccgctattcagaatgacttcagttactatcgaagaacaataagtcgtaaccgtatcaacaacatgcatgtgagtccgtgcatctccctggctggggccatgctctctctgtggcttctacacatggcagggcacagagaaaaggcagagtccttgtctatagcttgttttcagaaatggtgatctttatttttttttaacaactgtatcttgtcttgatttcatcagctagacattgagaatgaagttaataatgagatggccaatcgaatgtccctcttctatgcagaagccacaccgatgttgaagactcttagcaatgccacaatgcactttgtctccgaagtaagtgccattgaacggctcagcgggccctctatttacctcacgtagatgctgctagtaaggctaacatgcaattgtgtctctccatttagaataaaaccctgccaatagagaataccacggactgcctcagtacgatgacaagcgtctgtaaagtcatgctggagacaccgtaagtgaaagcagatgtgtgagcgtggctaactgttcacccagctgagatctgctcagaggtcatgatggtggcttgccctctttcagatgttatagtgaagtttccatgtacagcatttgcctcaggttcataaggaacttagggtggtcggtgtcaatgccatatccgctttacagctgaaatagctgaggccctgatggtttgttgacctcacaaactgtttacagcctgtctgatgctgtaggacttgcaaaggaatggagagatgggctaaatgggtgggtattgttatcaacatactgtagagatttagaaccaagagtaacaatcataagaccattgcaaatgtaattttccccaacttctcttcacagtctatttctttgttcttaaactatgaccagatacgcaatgtaatacccatgataccatctgctctctagagtgtttaggaccccaaaagtgtcacaagcaccttataaatactggctgtctccaaatataaaacaatgtttatccttttatataaacatgtatgtatatgtgcagtgttcatgtgtgtattcatattcacatattgtgaatatgcacatgtgtttgtatttgcagatgcactcttgtgttcaggtgcatatgtggtgtgtgtgtgtgtgtgtgtgtgtgtgtgtgtgtgtgtgtgtgtgtgtataaaccagacctgactgtgggtgtcttccttgattgctttctgatagtaagttgaggcagtgtcttccatttgaacctagatttggatggtgggactacagcttgctacaggtatgccctatctctgcctcccaagagagctgggattgcaggtgggctactaccttagtcagggttactattgctatgataaaacgccatgaacaaaagcaactcaggaccgaaaatggttattttgcttatacttcacactatagtccatcgttaaaggaagtcaagacaggaactcaagcaagattgaaacctggaggcaggagcctgtgaaggggtgctgcttactggcttgctcattatgacttgctcagcctgctttcttataaaccctaggaccaccacctgcccaggggggcctcacccacattaagctgggccctcctcaatcactaataaagaaaatgtcctataggcttacctacagcccaattttatgaaggcattttctcaattgaggctttctcttctccagtgattctagtttctgtcatgttgacataaaactagccatcatgtctgcctcatacatataaagacactagggatctaaactcatttcctttcccatgggcagcaagtgctttacccagtgaaccatctctcctgccccataaaagggtattaattttaaatatctccttcatagcaaagtaaagatttacttcaagacagaaatagtaattgtctgtattgtggtgctaattcataatgaaattgatgctaaaaatgtctctagcattggcctaaattattgcaatcaccagggcccctatcaaggtaagtgagcaaaatttaaactccacaaataactcccaggtacataatttctttgagatatctgccaatccaagttcgtccacagccggtttcgtaacaaaggaagagactccagctggagacaagagagctgctgtgtagaaatgagcctgatttttttttcctctgtaatgaagccattattctctataatctcggacagccagagggcccggctataaaatattcaggattgatgggcagcagttgatgtacgtggtaagctagctactgaggggaagcagagaaggaaatttactgccctctaatttaccgtatttttacactaaattgctggttggatagattcaagagaaattatcatcttgggtcttttcaagagcgtattaacctggttgtttcaggtcctggatgagttctccggggggagggggggatgagggtgtggaggagtatccggttgtgggtctcagaatgtgtgtgttctaacaagatgtcttggctgtgtcttttctttcagggagtacaggagcaggtttacaagcgaggagacactgatgttttgcatgagggtgatggtgggcgtcatcatcctctatgaccacgtgcaccccgtgggagctttctgcaaaacatccaagattgatgtaaggatactcatgtaatgctctctccacataaagcccatgaaagccagcaggcagaccttacttctcgtcctctgcctccatcactcactggaaagacctctccaacattcatactttggagatgcttggcacatattttatagcaagtagtgcactctttctcacgtggttaggaggagatatctggcctctggtgggcagagatgatccacctgtatcttcacactgccctttgtccatcccggattccctgtcagtgcaccttctgtaccttatagagtacacaccttatgggtgttatagagtttagagtttctaggttgcaaggcatgatggtcaaagaccaaatgacctaccaatcttatacctcacctgctgtcctgtcaatcatcctatctgttcttattgcaagaagtgccctggagcacacttcctgtgccccacataagtaatgccttctttctcctctagtcctcggctcatttaccagtttgctctttgtaacattccaatagacccagctttttaaaaaaggatagggacaatggtcagtgtacctaatgtcctgaggtattgtacctgataccagtagaggcccccacagagccaaagagtaatgtcaatgagtaagtgcaagtgaaagaaggagagaaagcttcaatgcctatggagagacctttggaaacacatcatcactacagttgctttcctgttgaatgtagaataaaacattactgccgtaagccagcatttagaataaaatgctactactgtaagccagcatttacctgtacagtggattagttactttttctactgctgtgattaaataccctgacaaaagcaacttccagaagagtttattctggctcacaggtcagggcacagtccatcatagggagtggcagcaggagctggaggcagtccggtacaatgcattcatgtttaggaagtggagagaaatgaatactgctcattgtattttgaggggtggatgtgcctagcaaattagaatcctgccatgtgcactatttgaaaatatattctatttacataagggtatattatgacaaccttgcaataaaaaggttgattgtattcattgtggggggcttacgggttttacactacagattgagtataagcaactatggaaaaactctaaatgtcatgtgactgtgagttgagtttagtgcctaaggcattttgggttggccatttgttaacttgccacagagtcaataattaaaaaatgtgcagggcgaaatgaagcttttttttcccttaaccttttctttgtgatttagtgcatgtgtgttcacatatgtttgtgggctgtgggtttgtatgcctacgcacacaccaacagaggccagaggaagatgtaaggattccctggccatcactcttctcattattccctggaggcaggctctctcatagaacctgaagcttgtggagttggctaggctggctggcctctcctttactagcatcccctagctccacccacaagttcttgggtcatgggcacaggacatttgtatgtggttgttggggatttggattcaagtccttgtaaagcaagttttcttacccactgagccatctatccatcccttgtcaccccaatttctacagagcttggctttctatacgatttactaaatctgttatgttcccaagcaaagcctatgttggctttcaagagcattgttcaagtctgttgattagtgcagattaagaaaggctagtggatgttgaactgtgcatgtgcctctaacacgattttaggcttattaagcacatccaaggtgggtttgtccttccaggtaccactctacttctaaactctacttctaaaccagcagttatagccacagagttgataagtcctgaggacattagcatttagggataaggccctggaagtggtactgtgcgcatacccaaaggatgaggtctggtttgcagaagaggcatgcagaaagcactagaaaccagttgagggagagaatagctgcttagaggcaacagcaaggaggtgatatttgaggtagtccttcaaggattttatctttcagacagatagagggaaggaagagacagagcaaaatcactaagagaagacacagagatgatgagctgcttacagaccaggtggcagtcttggtagcaggagtggtggggatgaagtagtgttctcaagtgatccccagagaatcacaccttaacctctatcctcagccttgacgttgcccataactctagaccacactagttatggaaacatcaagcatgactggttcccaaccaagggttctctttcccttgctaaccatatttcagatattgtcttatttatctcattgggtttctaagctagaagaaacccagagctgtcaccctcagatcctccaattgccagtgacccccttcctcatcctcgtatgttactaaggactgaccctccatccgcaccccgtgtgtttcagctcactgttaccccctcccctcatgccctgaggatttcccgctcctcctcctcgttctgtctttgcttcatcttgtcattttctatactcactatatttatgcagtgcttaacacctgccaagggtattttctacaatgaaaagcctccaagtttctactgtgttgctaaacccacactggctctgtccctgaatgcatttctcacagtttcttgttattcacacccacggctttaatcatccagaaatagaattagaaactcctccagactacccacttgcacttccgccttcttctccatctatgctctcactgcccttccgtatgccatcacaagaacacctatcacacggtgataatgagctacctgtctctctcctcccactagacccccccaagctctaatggaagaaggacaaattctctgcatctctgggcttgatgccatcacagacccaacgtggcacagaactggcatacttgtagtctctctccaaaattgtatctttgatagatgtgtgtagttgaacatggcagtcattgttctttgacctccaaatgcttctcagcaactggctgagtctatcaagctgttaccacagaacttctgcatttgaacaccacaggggatgtcgtgaagttatcactctgcaagtagctgtttgtataaccaaagtcatcagatacccacagactgtgtgaatatctaagattaaaataagtgattgactttttatagaaagatctttgctttttccaaaggagaagtaaaatactccaggatatgcataaaataacaggatctatgtaaattttccttttcatggctcaattagataactttaattccaaggcctcagaaaacttagaaacttaaggaacttcatgcaaatacaaaacagcatgggtaaaacccaagcattcgacctctgtaagttcacattctttacaactgccctttgccagtcttctcagacacagttaagacacagacctgcacttctaggagtttcaggtctagtgcaagagacaaattattcacttgggggctagtctattgacagttacctaacaagtataaagccgtattggaatcacaaataagtggttgcgactatctttggtatggacagtgggatgaaaagagaccaccgcagagccacagggatagctcggtctatatggtattcaccttgcaagtactgggcatgactttgcccccagaagccatttgttgttgttgttggtggtggnnnnnnnnnnnnnnnnnnnnnnnnnnnnnnnnnnnnnnnnnnnnnnnnnnnnnnnnnnnnnnnnnnnnnnnnnnnnnnnnnnnnnnnnnnnnnnnnnnnnnnnnnnnnnnnnnnnnnnnnnnnnnnnnnnnnnnnnnnnnnnnnnnnnnnnnnnnnnccccctatcccctcccccaaccccatccccttgctccccaacccacccactcccacttcctggccctggcatttccctgtactgggacatataatcttctcaagaccaaggggcctcccttcccaatgatggccgactaggccatcctctgctacatatgcagctagagacacgagctctggggggtactggttagttcatattgttgttctacctatagggttgcagatccctttagctccttgggtattttctctagctcctccattgggggccctgtgttccatccaatagatgactgtgagcatccacttctgtatttgccaggcactggcatagcctcacagaagagagctatatcagggtcctgtcagcaaaatcttgttggtatatgcaatagtgtctgggtttggtggtggtttatgggatgggtccctggatgggccagtctctggatgatccttccttcagtctcagcttcaaaatttgtctctgccatgtttttttaaaaagaaaaccatatgttttgaacatgcttgcattcctagccctagaacagaggtggggagatgccttagcttgcttgtcatctagtctagcctaatctgcaagtaaagtaagcaaagagatcctgtctcaaaaattaggttgtcagtacctcaggaatgacaactgagcttgtcttctggtctgtccatgcatgcaacacacatgtacctataaacacacacataccaagcatatacacagacacatgcacacatacatacatgttttctgaggctgatgaacttgaggctttacaaaatattgagcgtgtgacagtcaacagctcaaagcagaaagagcatccttagcagacaaagcactaaattactgagtgtatagaacacgtagtgaatctcaactgagggccaagaagaaccatttctagtactggtttgagctccatagtacaaggcaagaggtttctccccaaggaaaatgagatgcccagttgtagcataggatgaaaatcagttgggattgcagtcatacagaactcttgagaagccccgagcagcgctgcaccatcccgagagaggagagaagcttgtccatgattggcatgtgctgatgcttcagagagctgtttggatggacagatgtcactgtggacaggatgacgaggttaataacaaaattctgtgcattcttcttccagatgaaaggctgcataaaggtgttgaaggaacaggccccagacagtgtggaagggctcctgaatgctctcaggtgagcttgtctctggcagaggctgatggagcgggagcccttgcaggccattgcagatgtgggtgtttgagtctgagcaccaacctatcagtcttagccctccactcattttaacatcactcctctccctagcaaggtttggaggtcagcaccatttttactattcattttgtacagatgggagaatatgaggcaacttttttttaaggcgttgggttttcgagacagggtgtttctgcatagccctggctgtgctcaaacaagctctgtagtcctggatgaccttgaactcatggatctgcctgtctctgcctcctgagtatttgaattaaaagcctgagccaccatatgttcaaataacttttcaatgtcataacagtaacgggccaagttacctatacttggatctgagtggacccacggatctcagacttgacttggccaagatactctggtagcagaggagtcttctgagaaggaaagcatccatttctcatgtctgccttcacccagggctcccaacccttgcttcgtgggttgatacataggcactgaggttggaggtcaagtaaattaaatcactggatcactggcctggaagctcaactcaggcannnnnnnnnnnnnnnnnnnnnnnnnnnnnnnnnnnnnnnnnnnnnnnnnnnnnnnnnnnnnnnnnnnnnnnnnnnnnnnnnnnnnnnnnnnnnnnnnnnnnnnnnnnnnnnnnnnnnnnnnnnnnnnnnnnnnnnnnnnnnnnnnnnnnnnnnnnnnnnnnnnnnnnnnnnnnnnnnnnnnnnnnnnnnnnnnnnnnnnnnnnnnnnnnnnnnnnnnnnnnnnnnnnnnnnnnnnnnnnnnnnnnnnnnnnnnnnnnnnnnnnnnnnnnnnnnnnnnnnnnnnnnnnnnnnnnnnnnnnnnnnnnnnnnnnnnnnnnnnnnnnnnnnnnnnnnnnnnnnnnnnnnnnnnnnnnnnnnnnnnnnnnnnnnnnnnnnnnnnnnnnnnnnnnnnnnnnnnnnnnnnnnnnnnnnnnnnnnnnnnnnnnnnnnnnnnnnnnnnnnnnnnnnnnnnnnnnnnnnnnnnnnnnnnnnnnnnnnnnnnnnnnnnnnnnnnnnnnnnnnnnnnnnnnnnnnnnnnnnnnnnnnnnnnnnnnnnnnnnnnnnnnnnnnnnnnnnnnnnnnnnnnnnnnnnnnnnnnnnnnnnnnnnnnnnnnnnnnnnnnnnnnnnnnnnnnnnnnnnnnnnnnnnnnnnnnnnnnnnnnnnnnnnnnnnnnnnnnnnnnnnnnnnnnnnnnnnnnnnnnnnnnnnnnnnnnnnnnnnnnnnnnnnnnnnnnnnnnnnnnnnnnnnnnnnnnnnnnnnnnnnnnnnnnnnnnnnnnnnnnnnnnnnnnnnnnnnnnnnnnnnnnnnnnnnnnnnnnnnnnnnnnnnnnnnnnnnnnnnnnnnnnnnnnnnnnnnnnnnnnnnnnnnnnnnnnnnnnnnnnnnnnnnnnnnnnnnnnnnnnnnnnnnnnnnnnnnnnnnnnnnnnnnnnnnnnnnnnnnnnnnnnnnnnnnnnnnnnnnnnnnnnnnnnnnnnnnnnnnnnnnnnnnnnnnnnnnnnnnnnnnnnnnnnnnnnnnnnnnnnnnnnnnnnnnnnnnnnnnnnnnnnnnnnnnnnnnnnnnnnnnnnnnnnnaagaggttgttatttttagctatgctgcatcctaaggaatttgctgaaccgcacaaatcatcctgcagaatctcaatcaggaaggcttatggaccctgatgtcttagccgttcgttcccctcagttccagatgatgtaagaaatgcctgcagtaaacttgggtaaatctaagagaaaggaggaggcactcatttctgcatgcagtgttccacctctagtcacagcacatgggaccactgcaacccttagaaccatggctgacctattgtcctccctcaacagacgaagaaatcagcagtctcaagacaccgaagctgctatttttctgagttgccaattcatcatctttgagaatatgtgtgtcttatgagcctcctaaatcctaggttttctccaaaggagactgcaagcaagctaggctggcttttaatattcattaagaagtctttaacttctgaacttcggaaacttttcagtttcaatctagctgccaaaacgtcctgaagatcagggcattgtgtcaagccactagtcccagcccagtgtgggaatttgtatttcctggagatctgtgatgaactgggaagagtgtaggcttttgaggcagcagacgtagactcaagtcaaaagtcacagactgttcacaaatcaaacccatctgctctgagattcagagtgagccactgactcacctgtgaaatcaagtcacttacctcatttaaagagacatttgtgactggaataggacctttgacgtatcatgtggtcaaagctttattacagggttttgtcttttttttttttttttttttagcattcctttgcacatgagattgagtaatgaataagatgctttagattgcacttttgtttgtgtacctcacttgtggcccctagcagcagtggaggatgtacagctcctacagtagatagacagcaacatctaaatttctggatgccataattgctcagcctcgaagaacaagatgctgaactaagcgctgtgaactttatctctgagaaaatgagatcagtttgtcccctttgcgtagtcatctaatgagatttttaaaaaaatgattttaataatcatcacacaagctcattagaagcttagcattgtggtgtatgcctttgatctcagcaatagggaggctgagacaggaggatttccctgagtttaaggccatcatgggttacagagagtcaatctggagcatagagtaaaaccaatctaagtcaaataaaaacttgcagaaagtatatagaatgagaaccaacctatgggtccttctctaaggaaacgagcacgcactgttggatttacaaatttcaaatgggcaagccctgacatgaaactctctttccccattcaggttcaccacaaagcacttgaatgatgaatcgacttccaaacagattcgagcgatgcttcagtagaggcctgctcagagaggaggatctatgctgacctcagaagatgtagatgtttacataatttaatacagattgatgttaatacttgtgtatttacataaccatttccttcttgtcactgaaatatatggacctgaatttgtatcctgactgattcaacccagccgagcataaattgacttgagcgccttacctttgatgtctgaagcgaaactcctttcaccaagggccagattcggaaacttcaaccttggctgctggagtcctgtagtgatacctgtaacaatcagaaattcttaatcgcttgtggtatggttttaattctagatgttttatctctctgggagtatagtttatagaaacacaaagtacttgatttcctgtgtcggctcagatacaagaaacacacacaactgttaccctgacagagaacagagagagaagatccaagataagaaaactgcatgtggagagcggcgcacaagagttctgagttcagcacgtcccccaccctcttcctgccgcctgcaaacctcacgtgcagcttttctatatgcacgtgttttattaatctgaatattctccttctgtctcggtttgtgtccctttcattcccttttagtatttgcaagaggaaaattgtctgtgttttaatcagctaatgaggaggctatgggatggacagagggcttcttgcaggagaattgagaaaagtgactatcttaagaatattatttctttttttaaaaaagaatattagagagaaagagagagagagagagttggcataaggacagtcttatctgtgtcaaccctctgcctgcagggacagataaatggaactctggttgtgatatcataactaagatcagtcacctcccaggagtctgcagagttctaggtacaccacccgtcttaatatgggagctcccattctgtatcaaaatggactgttcatatcagagctgagaactaaagcacttcgttcattatcagaaaactggaggaatttagagagaggaaatctacgatttctaattacctggagtcagcccccactagtctgagtacttcggcaaattcactttttgtctcaccttcatcatatggctcagtggttaagagtacctgttgctgttgcagaggacctggattggattcccagcacccactcagtggcccacaactatccaatactcccgatgcatgggatccagtgccctcttctgatctctatgggcatcaggcatgcacacagtacacttatatacatgcagaaaaaaatactgagacacatgaaataagataaatcttttttttaaatctaaaatggaaggctactaggagccactacactaacctttcttcatgcataaatccaatgagtactaccccacccatcttgatgaatatcaatatcttcaggactgcaatcattctgcctataggtcagaactgagctaggatggaatcttgaaacatattctgacctccaatgaaaagatatgggcatacaaggtgagttgtacgtagaactaaatccttgagtgtttcccacctgactctactatactcttcctgatcaccatgtggcctaagaatatatactatggagtctatggaccactgtagagaagtttttagtctagcctgtttgattacttgtaaatctctgctagaaggagagaattttccagacaactgaatgaatgataatcctggaagtcaggtctaggatgattagggtgtggtattatttggtttgcaacatcccaaggcaatacttccagactaaggtggccatccagcattcctttgagtcctccaagaaagatgatacttggttcatttcaaaaaaccaaatgcagacaaatgggagaaccagttccccagcttatgttagcatagtcaacagcgagcataaagactttgtcacttggagcgttaccagcagagtaaatgtggccattgactggcctaagcattctctaagagttgtgctagatggcttccatgatcttgtcaaacctagaaattccaaaatctcgaggaagctagaaaacacaatcctgtggcagtaagacattctccagtgttcagctttagggattttctatttggcagccataggcaatgcttatttgggcaactctcacgcctacaagagcagagatgcacaataagcatttgtccatttgctctttcctcaacagaggagattaggatttcaaagaacaaagaactgcccagtttctattgggctcttagacacagacctgagccatgaacccaagccacgtatctacaccatagctgcctctcagctggctacataaggaaacattagggattaactgtcagaatatacatacatacatacatacatacatacataaataaataaataaataaataaataatagcttaggacatttgtaactcttagttagactttctattaaatgggaccaaatgtgtgtatgggtgctgtcagtctgcttcagtctagccagtccagtatctccaagatgagactcaacaggacttggattttgagaagcccaggctctaaataatagcctcaggtcatcagggggacagactgagtgtctgtgatcactaacagggagtgggccttgagtccactccagaactgtggtgggagaccaatactcttaacagactgtccagtaggtatcgggaatccttgaacaatttgggttttcttccccttttttctctttcgtgctgcatgcacatttatccaacactcacgggttgtttgggaaaaagtaccagcaatgatgtcgatgttaataatacttcataattgatatcttatagctttcaagtaaagtgttttctataactcagataattaatttgaagcaagaaagaaggtaaaaatgaggtttcccagccatgttgctgcttttggcatggtcgcttctctgaggttcacctaggctttcacagcaaaagttgggtggaaagagaaatttttatttgtgatgacacaatagagccagaatattagctaacaacgttgaaggaggtgttgggtgtttttaaatatttagttaatatattcctcatggacataaaatacattcttagttattatcattatgtcaaacaagaatggcaagcctaagtttgtgaggcatcatcacaattctgtcaaaataatgttatgcttttgaaagataaagcctgctcaatctagggatccagttgtgcagtagagttcagacttctcatccaatcttatattgtaggcatttctcaagtgttttagatattaataactaacattgggattttactttgccagccccagccttcagaactccattgtcatagtacacctgtaaaaatggttgcacatcagaaggggctttgaagcgcttgtatgttgtttgccggagtcattgtaatttttttgtttgtttttttgggctttttgtttgtttgtttttgcctgcattgcctctttttgtacagaacttttgagtgtgaaatgaaaattaaagtttggtacatacacagtttaaaatcatgtttgtatatgatgcataggcaaaatggatggccctgcatggaagtctgctcaacttgctgtgaggaaatgacgtcatatcagctgatcttccatcatagtttcttcaaatatggaatgtaattccccaaggggcctgcttttagaatcactggtctcacatttatttcaacaaggaccttaattatattaaaattaaaataaagaaagagagagaaggagagaaagagaatcaagactaatacttagagatgtaagagagctgcttgtccaggcatgctaagaaactccaggaatgctctttcactcattttaatgcagtagcattttgtgaatttggcaaaatgggtgaaagaaggaaaccctcccctgtgtaagttcatttctttcagacaacagaagcattaaaatggttcttttaactcttcagcactgacactttccagagtgccacttttattactctctaaacttctgaagccagagacctaattgtatgttttctcaatgaatttgaatctccaagagcgaccttctataacagccagtgaaaaggttgacttggggtatgaaaggaatgggaatgaggtcttttctgtaaattgacaaatggttgaattataagtgggtggccaggcagtagtggagcacgcctttaatcccagcacttgggagacagaggcaggcagatttctgagttcgaggccaacctggtctatagagtgagttccaggacacccaggactacatagagaaaccctgtctggaaaaaaaaatatgtatatatacatatacatacacacacacacacacacacacacacacacacacacacacacgcatgggaaaagtctggtaaacaggaaagaagattttggagtatatgagtgtgtatatatgtgtctgtctgtctgtacttacaggaccatgagaaccatggagcagggaagaaagtatgtatgtgcctgtcaagatcgatacagttaaataatgttggtgaatttatttgaactgtattcattaggtatattgatttccatgcccaagttgaagtagaaactagtaaaggacccactcatctgacccatgtggtaactcatacaaagtaaatagagggttgaatattgcattcaccaccccccacccccagctgaccttcagaatagagagctatttttttctggtcacattcagcctggcaggattgtttttttgtttttttgttttttttgttttttctgctgtgttttctcttccctccatctgattccaaagatctagaaatgcagcaattcatggaaataggctccataaaatgcttctgtagactggcctttgaaattatgctatgtaggattctagatcaatctcagaatttaatagtgattttcttaagtggacagttcttagaaatcccttaaagtattttctcatcaaaccttgtgtttctggaagtctctccttctctacctctcttttctgcttagttttaggtcttctttgccttccctgcagttggttttgtttcaagatgagggacatatttcattgaccattctgtggctgctaatggtgtcattggtctgatttgagaaacaaagggctctttcttgaagttcactctaaaatcaacatgaaaacacttggggaagccatcaaactactctcctccaaataacaatacacttggaagaaatgccttccttttgcttgagaaaagtcctctgagaagcatggggaagaggacatggttgatggttttataagtaatcatagatgcagagacacttcattcccataatgatgacatcaggcgtaccatctttccttccatgtgtttgaaatttgcaaggccaagcctttcttttatttcctccatggatttttccatgaataaccttctccagtccctacaacatgctaaaaattctcttctgaactgttactgcatttaacttactttctactagatccatgccagtacacagtgtttggaaatgtatcttttaatcactgagtcttgaaattctgaggacaaataatgagcctcattggacaatagaagctttctactaatgtgaaactccaaggccctgaaaaccaggtgtgttgaagttaatttttgagaattggtttacccaacttaggatccattcacatactcacattacctgctcagttggacaatcaattttatttctggaagaaatatttactaactgtcaggatattttaacctctctggacacagagaggttgcaccttatggctcatttgcaaagaacccaaatgggaaaacagactgcttttgattaaaagttggagcagctagacctggcactggaggtagccagtacactaagcaggtagtgtcttactccattcagaccagggtgttctttagtgagaatgctgagtttgacacaaccagaacaccaaagcacaacaaatcaactcaatacaaagtagatttgtcaacttgacacaatctggagtcacctgggaagagtctgaatgttggagtgtatgtatggagttgacctgtgcctatatgtgtgatggaatatcttgattaagttagtttgcctagaaagacccagcccactgtggatggtaccattccatagatagggggttgtgtgagaatgaagaaatggaactgagcacaagcaaataaacatgcacatatctacttccccctgttcttgactatgggtgtgatgcgacagtttttagcccctagccccttgagatccccatacaaaaggactataatgtgtaattgtgaactgaaataaacctggtccctcctaagctgtttttttagggtattttatcacagcaacaaaaacaaaaagcgatagctacagaacttggttcagcaccttggatagcagaccatgcaacatctaataagagtgtaatggaatctgaaatcaccaagtcttgttggctatttccaggttgtcttgagaagtctgaatattaaagatttgtaactttcaaaactatatccactgggttactgccaaggcatttttctccctcttgggacttctgagcattacataaattgaatagaaagcagttgggacatgtgtagaaatgaagctagcttttcacatttatggtatgttgaaataaagcaaactcataaaaatggcctttctccttccccccatccttcctcttcttccctcttcttttctttagcttttgggacaaagtctctctgtgagcccagtcttgctcaccccaattctgtgcactacaagtattcatttttaagccctatactgtttgttaattatgaccacaaagcataacacacatgctttctaaagagtctcaaaacatatactaacatctctgaagtctgttttatttgcttcaaactttctcgtctctttccaagatcactatgctacactagcccctcctttagtctcttctgcacatagaagataacttactttattgtggaccatatttggtaatatgtgtatctttagcaagtttcctgaaatatgttgttagagatattcattggcattctccagggagttaatggtaatattcaaatatttgtcatacaaaattaaatacattattactttatttacctatttatttcacaaccagattttccccatatattatgagttttcacaaatgagatgatgaaataattggtagtaattttcagaagcatttgtctataaaattattttgtgtttcctagaacatcagtaatttcttatggtcattatcactctacaaaacactacaaaaatactagcgtgagatacaaggccttccaagagacaaaccatctaagtgtgttagttctttcattccttcatctaaactcctaggtccatttcattcaccatatgtcaaagatgctgttttactctcctatgctacacagccattctcagttttctagtgtatcatccatttttcctattttatgtgtggacaataatactgcttctttctggctggtgttctatttcctctcattatctgctatgtagaggcctggtcatcctgagggcatcgttcagatgtcttctttgagcctttccatgagctgcctgagcaaagttttgtttactttcctgtttccccaacctttctccttcttctctatcctccctctcttgtcctccctccctcctcttccctttccttcttttcttccatatataaagactaaaagccaaactacacctttgatatgacatatattgtcttagataagttcttgttgctgtgatgagacatcatgaccaaagcaacttggggaggaaatggtttatttggcttacacttccagatcatactccataattggaggaagtcagaactgtagtctcccctcccccagcctgaaacctgcttgctctggggtggagtttcctgctcattcgttctgccacgcccactgctggaacctgccgccttgctgttccgaagccatcacgtgctcaccctgctactggattccgagattatttggcgggaatcgggtcccgtcccccttccatcataactgagtgttgcaacagtaaaaattgagctttgatcagagtgacttttgacttggcttcgttctttcttccgcccgtctagttcttctctttcagcccgagttgccatctcagttgaaccgtttgttgcaagctgcgggccggccttaacaagaacaagacctcaaacagggctgagacttggagatgagagctgatgcagaggccatgggggtgggggggtgctgcttacgtgttttgcttagccttttttcttaaaaaactaggattactggcccagggatggcaccatccacaatgggctaggccctcccccattaattaagaaaatgccttacacctagatcttacagaggcatttctcaattgaggttacacacacacacatacatatgtgcatttggttaatatatacttattaatttattttatatatatatatatatatatatatatatatatatatatatatatatatatatatatatagtgtttttaaaatgccaaaataatgaaagtcaaaaattaaagatctgtattatgggaaacacttaatttttgaacctactttcaatacataacttcaattgaatcttttaatttgctttgctccccaagtcatgagtgtcacataatctatgtcagcctgggaccagatctacattatgttctcagaagagtggtgtgagtcataatagtcatgtttcaagctactcagaacactgacctaactcctatcatggatttggatcttcttatctctgatttcttaggtcaatttcccaggattcataaaatgtcaacagaacactctaatagaacacatttcttcaaaacattgaagttaatgcctcaaatatgggttaatattcaatgacaagcttagacaaaagaagaatgagaattccagtcacagatgagtataactggagtcttctgcatgacctaatgctaaatgtagaaacaggaaagcaaccatcaaatgctgatagttctctggaccaggctaaggttctcaggatgccctaatatagggatacaaccctaatatgtcacagcatcccagtttagttatcatgctcatatgacatggagacacatttggcaggtggaatagcatttcaaccacctaagaagtgagtggttgtccacaataaagaagagaaaagttaggggctggtgagatggctcagcggttaaagagtattagctgctcttccagaggtcctgagttcagatttcagcaatcatatggcggctcacaaccatctatgaaggggatctgataccctcttccagactgtggatgtatattcagcagagcactcatccattaaataaataaacgtctgtctgctttcactgtgtgcttatttagagaaatgttctcatgattggctcacaaaactcagacatcttcaaagtgcctgtaccaggtggagctgggaccctagctcagggttcagtgctgtgtacaagcatgaggacttgagtttggtccccagcacccacatttaaagccagatgtagtggcacttacttgttatcccaacagctgcaggtagatcttcgggctgctcggctgagcagcctactctagataatactccaaggtgccagtgaaaacccatgtttcaaaaaggcatggtgatggcttctgagggataatacccaatgttgacccctggcttccaaataagtgtgtatgcagatgataaaggtgcatgctcttctgccctcataggtttaccatgtgaatacacacaaacacacatgcacacacacacatgcacatacacatggacatctacataaagcaatgtcaagagtatcctagctacacagaattctcctatctcccccaattctgcactccccccaccgatataaagggcaacattttctaagtagccatgagtaggtgttacttgaatgaatgaagccaatagaagagcagacgcagcacggggcggggaggaggagcagccatttctaaagactctcttgaagcttcaggtttggttgaagcagtgcatgaaggaatggattaaaaaataaaattagttgtttcccataataaacacctttacattttttactttcaatattttgccacattttaaacattattttcattggctccattgaataggaattttgtatcttgtgaaaataaggtcatgctataaataatgtatacattgatttttcttgtaaagtaaaaaataagcactgtgcaagccagtatgtgtacagatatagagaaatgaagctgagtgcacacacacacagacacacagacagacagacagacagacacacatgctataaaattaagttattattaatttagccattttagttcacatctcagatgttttgaggtttagttgatacacaatagactaaacatatttaaaatgcctatgttaatattgacacatacaaattatgctcatagtctgaaagcatcagcacgctgtatgtaatagcaattacgttatccctgagtttgctcagctcctctgtagcccttgtctctccatgctcaccccaccatccccagcagcatgggtatgtgttgcctctgtaggttcctgtgtagtgtgtacaacttttacaaaaaaaaaaaaatctacagtgtgacttcctttttgtctggctgtgtctagttcttctgctcactcggctatcagcaaatttctgtatgacaatatgcctcccttgtctatgggcagtgtggctggattatgtatttagattttctaagagactatcagacagtgttccaaacttacaccagcagtgtgcacatacctataatttattatttcacaagtaaaaaaaataactatgtttattttactgaaaacttctttttatgctacttatttgttgtgtgtccatgtgcattttggaggtcaaagaacaacttatggaaggcaatcctttccttctagcatctcaatggcccttgactgataatttctttatatttgacttgaaatggagagtaaatgactctttggtattaagttagatattaagaattaattaattaagaccaggcaggatagattaagttctgaaataagcatcattaacgacttcttgaaaatgtaatatcgtctttgatgttattacaaatagtaacactcatctgcggtggaacgcagggagtttgactgtgcttatcccacagcgctgtctgtcgcggcaggtgctgggcacccagacatcactccggggttgggaatgcccagtctgagacgtgggaaaaccagagctgactcatgggctcccagcctgcaacaaggccagggcaatgggattctcagacccatggacacccaggcgcccctgggagtcccagaagagcagagaatggagttgggggcccacgggctgggaacagcatctagcccggggcctggggaaaagggagctctgtcttgccccaccgggattgtccttggcttgacagcaatgggcttggtagcagttgtggctggcagtgcagagaggccttcaatgggagactagactgaggctctgtaggcaaaggccatctccatggctcccctccgtgggtttcgatgaaaagagtctgtggtcccaaacagtttattgtcacggtggaaagtggatgtgtaaaactgtaccccacttctcagggtgggcctgaggttacataccttttgcagggaggaatgtctgggaaggaaagtttttttggtaactccctccagacctctaggtacctcattagcatagagaactgttttgagcc

SEQ ID NO: 3119 - DNA, 3062 bp, Mus musculus
gcggcgacagcggctgcgactccgagcagagagatagtgctgaagaggcttccgttctttttcagtgggaagcaacactgaggaatgcaggtgagctgaggcgcagagaagagggctctgaagagaagcaccctgaggtctggattggtgacacacacccactggagattatttccaggtttgctggcatgggaaacttgctcaaagtcctgacccgggaaattgagaattatccacacttcttcctggattttgaaaatgcacagcctacagaaggagagcgagagatatggaaccagatcagtgctgtcctccaggattctgagagcatcctcacagacttacaggcttacaaaggggcaggaccagagatccgagatgcaattcaaaatcccaatgacattcaacttcaggagaaggcttggaatgcagtgtgtcctctggtggtgaggctgaagaggttttacgaattctccatccgtcttgaaaaagcacttcagagtttattggaatctctgacgtgtccaccctatacaccaacccagcacctggaacgggagcaagccctcgcaaaggaatttgcagaaatcttacattttacccttcgattcgatgagctgaagatgaggaaccccgctattcagaatgacttcagttactatcgaagaacaataagtcgtaaccgtatcaacaacatgcatctagacattgagaatgaagttaataatgagatggccaatcgaatgtccctcttctatgcagaagccacaccgatgttgaagactcttagcaatgccacaatgcactttgtctccgaaaataaaaccctgccaatagagaataccacggactgcctcagtacgatgacaagcgtctgtaaagtcatgctggagacaccggagtacaggagcaggtttacaagcgaggagacactgatgttttgcatgagggtgatggtgggcgtcatcatcctctatgaccacgtgcaccccgtgggagctttctgcaaaacatccaagattgatatgaaaggctgcataaaggtgttgaaggaacaggccccagacagtgtggaagggctcctgaatgctctcaggttcaccacaaagcacttgaatgatgaatcgacttccaaacagattcgagcgatgcttcagtagaggcctgctcagagaggaggatctatgctgacctcagaagatgtagatgtttacataatttaatacagattgatgttaatacttgtgtatttacataaccatttccttcttgtcactgaaatatatggacctgaatttgtatcctgactgattcaacccagccgagcataaattgacttgagcgccttacctttgatgtctgaagcgaaactcctttcaccaagggccagattcggaaacttcaaccttggctgctggagtcctgtagtgatacctgtaacaatcagaaattcttaatcgcttgtggtatggttttaattctagatgttttatctctctgggagtatagtttatagaaacacaaagtacttgatttcctgtgtcggctcagatacaagaaacacacacaactgttaccctgacagagaacagagagagaagatccaagataagaaaactgcatgtggagagcggcgcacaagagttctgagttcagcacgtcccccaccctcttcctgccgcctgcaaacctcacgtgcagcttttctatatgcacgtgttttattaatctgaatattctccttctgtctcggtttgtgtccctttcattcccttttagtatttgcaagaggaaaattgtctgtgttttaatcagctaatgaggaggctatgggatggacagagggcttcttgcaggagaattgagaaaagtgactatcttaagaatattatttctttttttaaaaaagaatattagagagaaagagagagagagagagttggcataaggacagtcttatctgtgtcaaccctctgcctgcagggacagataaatggaactctggttgtgatatcataactaagatcagtcacctcccaggagtctgcagagttctaggtacaccacccgtcttaatatgggagctcccattctgtatcaaaatggactgttcatatcagagctgagaactaaagcacttcgttcattatcagaaaactggaggaatttagagagaggaaatctacgatttctaattacctggagtcagcccccactagtctgagtacttcggcaaattcactttttgtctcaccttcatcatatggctcagtggttaagagtacctgttgctgttgcagaggacctggattggattcccagcacccactcagtggcccacaactatccaatactcccgatgcatgggatccagtgccctcttctgatctctatgggcatcaggcatgcacacagtacacttatatacatgcagaaaaaaatactgagacacatgaaataagataaatcttttttttaaatctaaaatggaaggctactaggagccactacactaacctttcttcatgcataaatccaatgagtactaccccacccatcttgatgaatatcaatatcttcaggactgcaatcattctgcctataggtcagaactgagctaggatggaatcttgaaacatattctgacctccaatgaaaagatatgggcatacaaggtgagttgtacgtagaactaaatccttgagtgtttcccacctgactctactatactcttcctgatcaccatgtggcctaagaatatatactatggagtctatggaccactgtagagaagtttttagtctagcctgtttgattacttgtaaatctctgctagaaggagagaattttccagacaactgaatgaatgataatcctggaagtcaggtctaggatgattagggtgtggtattatttggtttgcaacatcccaaggcaatacttccagactaaggtggccatccagcattcctttgagtcctccaagaaagatgatacttggttcatttcaaaaaaccaaatgcagacaaatgggagaaccagttccccagcttatgttagca

SEQ ID NO: 3120 - protein, 321 aa, Mus musculus
MGNLLKVLTREIENYPHFFLDFENAQPTEGEREIWNQISAVLQDSESILTDLQAYKGAGPEIRDAIQNPNDIQLQEKAWNAVCPLVVRLKRFYEFSIRLEKALQSLLESLTCPPYTPTQHLEREQAKEFAEILHFTLRFDELKMRNPAIQNDFSYYRRTISRNRINNMHLDIENEVNNEMANRMSLFYAEATPMLKTLSNATMHFVSENKTLPIENTTDCLSTMTSVCKVMLETPEYRSRFTSEETLMFCMRVMVGVIILYDHVHPVGAFCKTSKIDMKGCIKVLKEQAPDSVEGLLNALRFTTKHLNDESTSKQIRAMLQ

SEQ ID NO: 3121 - DNA, 136071 bp, Homo sapiens
  misc_feature (1)...(136071): n = A, C, G, or T/U
tgttaatattctgggtgacaagaacatagatgtttgttacattaatgtttgtcaatgtatcccttagaatgaggtaagcacctctcagtcattactccttagtgtgaattagattatcagtgcttggatcaagacaaaaaataaaaaagaaatagatgcatgctgaaatcacactttagttactgacacactcccccatcaccttcaataactagtagaatctccttagaaagttagaaaatttatctataatggccactctctaaatctcccattacttcagtcaaactgaagtattcataatgtcctgagtaaactcacatctgggtacatttgttgttatttctaactttctccctttttccctctgggtcaattctactcaacctaaatatgtaaaaacataaaatgtattccaaacatcagtgacacttggttggaaaaaaataaaagcaaaacaaaacaaaacaaaaaaaaacccttgaccacctgcaggaaatgagcatcaaattagtacgcgtgtcactttggcaataaacaaaaccaacatattctgctgtgtttcttctgctaggtgtaataatgattttttgttttgcttttcgcagtcctttcacttctgtcactttatatgattttttcaacattcttatgaggttgacggggcaggcatttattatccagagtgaacaaataaagatattgagacaagagaagtttgctgacccactcaaaatcatacaaggaattcaaagtagagctgttcccaccacccagggctgaagactacgagctcttcccattagatcactctgcctgtttagaagggcagtttctgattcttgtccacatatttggccagggccttacaccatatacactcatccttcttggagacaagacttaatggaagccaatggaatccatgagaaattgtggaggaacttgataattttcaaacagaagacgagcatcctagataggcaacacactgcaaactttggtgttcatatcagaaggtggggtgaatgttcagtatcagggagacccaaaaacaccagcctggatgcagcacatgattgctgtggttttgaatcccagctctgccacttacttgccttatgactttgggaaatcatcttccctctctgggcctcagtttctctgtctgtcaaatgaataaataggtttagattatgtctaaagccccttctcctctgagattctaagagctggaaatgattaactatgtatagtaaaagttaatattcctttttcctttctagaagaaaacccacattaagtggattcaccgtatagatgaaacatagaaatcagaaaattaacagcatttatatatataaacataaaaaacaccagattttctaaaattttccattttctctcccactaacagatgggaagcagtttgatggagtttatcagaggaagcagctgccatcctacatgagtgacactaatgagacaggtgaaatattcaagagcccaagactgtcttcaagaaactactgcagctctggcagggtcatagtgggcttgcctgtaggtttgtcttctgctctaaaaatagactgtgtaaatactattttttataatgatgatgactattatttagagcttgccccagcctccaggcaaatgtcccaggaagaacaaaaggacgcttagtataattaaaacaaagaaaatgtagaggtgttggcatgtgagaaaaggaagtgtttcaacatcagaagccaagaactatttgttggatttgattaataatcactaatgtggattttattttaagatcacacaacagtgtggagttttgctttattcatacacacacaaaagcagccaaacagctctatttatgaaaaagttattacattgcccttctgggcttgattgtacttttccagaaataatttgaaagggcaatttttctaatctctggatcttgaagattcaggatcggtgtaattcagatcaactcagcggatatgaattaagtttggattagatgtcaatattaagtttaaattaagtttatattagatatttagatgtcaaacattgagaacacaaacattgtgtgtttttgcgtgtatatataatttataattttcaggagcccaggaagtaataggcagaattaaaacactgtgagatacattctaggaagaggaaatagcaggtataaaagcagatagaagtgataaaatatctcaagttaaagagcagagagaaatgcagcagaaagaacaagtaaaagcagattataatttggccatatgagttctgcagagaatgtaagactctggtctagtgtaatggggagccactgaagagtttcaataaagggattccgtgatcatagttgtcttttggaaaggtcacttgggctgcaggatggacagcgaattagataggctagatatgaaggcagggagatcagccagaaacctgttgaaataactgtgctgaaaactgataaggggttgatctgggcagtggctgaaggggggataataaagaagatataataaatatgaattctaaagatagcaagtttcctccaagtatcactattctaaggcatttctcaagtagttacagggttaaaaggcaaacacaataggctgcaaaccatgaatatagccatttatgtggctgtcgcatgtagtaatgagcatttaaacataaaatattaatataatattagcataacttacgaagaaactctacagagtcaaccattctgtttgatgataattttaacactgtgttattactgaaattgtatttttcagctgccaaagattaggatcaactgacctatgaaaaagtatcagtggatctggacttgaaacagaagtcacttgttgaaacttttcaaataagagagaaagaaagagagatagagacagagtggataatacgaaagaaacctggcctatgtctgaatcaaaccttcccacttgcttgctaatattttctgaaaagcaaagaaagtatttgcaaaggaaaagaagaagattgattgtccaaataattcaagaattggtcctaaactatgagtcatgacacctgtattttaagttattggctgtggctgtaactcagttgatgacttgaacaagtcacatcaagccttaatttccaggctataaatgggtatagtcataagtgacccctacttacctgtttgtgtagctgaatagatgactaggatatgcctgttaaatgctctaagcctctgctcaaaggctcccatataggtgtcattacttcattggcggtgattttggagactgtgagctttgaaagtggtgagtttgagtcccctaaaggggcagactcattttgtcaaaggtgccaacaatagatgcagtcagcaatttcttgggtttacctggccagccaaagaatgagatcaactgacctacaaaaaaatatcagaagatttggacttataagaaaaagaagaaacatgctgagagtctgcaaatcagagagaaagaaaaaagagacagaaagaaaagaaaaaaaatttgtgggtgaaaataactataatcactttttaaacttggtagctgggtaatacgatttgaatctgtgtccccaccaaatctcatgtctaattgtaatctccagtgttggaggtggggactggtgagaggtgattagatcatgagggcagggctctcatgaatggtttagccccatcccctctgtgctgctcccatgatagtgagtgagtaacttctcaggagatctggatgttttaaaaatgggtaacacctccttcactttctctcttactttttctctgtccatgtaagacatgcctgcctccctttcaccttcagccatggttgtaagtttgctgaggcctccccagaagctgggcagatggccaacatcatgcttcctgtacagcctgcagaactgtgagccagttaaacctcttttctttataaattacccagtctcaggtatttctgtgtagcaatgtgaaaacaactaatacgctgggttacatcaggcactgggctagctactcattaattgtctgcacattcatgatcttagtaatatttctatctagcacagagtaggccctcaataaacattagttgcataaacaactccttgtggcaagtcctgttacaatcattttatttatgaatgtgagaaacaagactgagggcaattaaataacctgctcaaagtcaactgctgttaggtgtgaggaggggcccagatttacatctggaccacaatgccaagttcctacatggttcctctaacttccctgcctccactttccttccctattatcactgtgtcaccagcgacccttacagttcctgggctatgtaatttttcttcattgttggctgtcatttgactctgtttttccagatcctgagaattcatcccccacttctctttttgggggagaaaggtggatggtgctgtttatactcttccccaccttggaagtcaacatatgtattatccagatttgatacatatcagaaatctactctaaatagaatgctctttacatccagcattgggggctcttgtcaaacaactggcaggaaccaagtcaggtctttgacattcatatgggggaagaacccacaacattctttctgctttattaatgtaagtttataaattgttggtaaaaacctaaagaaatgcaaggccagattaaatgattcactcagtcaattggcatttgttaaatattaattttttaatgtatcaggtgctcttccaggtgttgaagagatacaaagaccaataataaagcataaatcctggcctcaaagagctcatagtctatttgggaggcacatagagttgctgttcactcttagaagattctatatttgtgatattgcctactcgttaaaatttattcataaccccaaaatctatactcttattgattttgtgatctctagacatgcaccaagcatgaaacacttgaggcacccagacatgcatgttccaagctgaggtccaacaagaccgtgttctgccttcctgtttcagctttcatacagtgtcctttttgtgatctatttagtgctacacttctttcacatttttgtacttgttgacagtgatttcaccatttaaaatgacctctgggggcaaggcatggtggtgcacgcctgtaatcccagcactttgggacgccgaggtgggcggatcacaacgtcaagagatcgagaccatcctggccaacatggtgaaaccgcgtctctactagaaatagaaaaaagttagctgggcatggtggtgcacacctgtagtcccagttactctggagcctgaggcagtagaatcgcttgaacctgggaggcagagattgcagtgagccgagatcacaccactgcactccagcctggcaacagagtgagactccatcttaaaaaaaaagacctctgagcacagtgctgaagtgtcatctagtgtttctaagcacaagaaggctgtgaagttccttacagagaaaatacatgtgttaaataaacttcgttcaggcatgagttatagggctgttgaccatgagttcaatattaatgagtcaatattgtacattaaataaagtatctttaaacagaaacacacataaagcaaggttatgtgttgattagttgacaaatatgtgaccaaagccttgcaggaacttaaccctacatttccccaagaagctatcgctcagcatttattcagtgtttaagatgactttatagaatatagctactgcacataaaaagaatcaactgtttagaaacttatccaatcatcacagcttggtgagtgctcctgtagacgtgtgagtgctattctttggaagcgcacaggaaagatcaatcgacttggtcttggagagttgaaggagtcattatagaggggttgcttttgaatcaggtttcaaaataatgagtagaaactcaaagaatggaccaagtggaaaggtcattcaagacagtggcgaatcgtgtgcagaggaaggaaggtctgaaagagcctgacatgctcagtgattaaaaagcaagtaaagtcagagtgcttaagtcgtgtgctccaactcagccacaggcaagggtttccagccattacaaagtttctctacacagtttgggctgtgatttttgcaacaaggaagtgtgcttcatgtcagctgtgaaaattggctcaatgttcataatcaaatctattatgctccctctgaagcctagtccatgtttccgtagaaacccctagttacataaaggggccccggccagcaattggcaagaaaacccaccacctttgtaagacattatagtaatgccagggagaaaacattatataatttctgctggagattagtgggcttggagggcaaaaataaagattcattccttgcagagcagtaagcagagagcactacagggcctcatgacacaggatccctccgtctccctgccatgtccttatctatgaattaacccactagccagtgggttaataagcactttaacacagtttgtaatgagcacttcctacatgctcagtccaattcaaggcaccacgaggccacaaacacacacacacacacacaacacttcacatattttttctttcacagctacaaagcagtttataatagccttcacatcacccttcttaggtagattttattactccaattttatggaagaggaaacaaaaacaccaaatgataaagtatccagtgagtggcagaattaggatttatgtttggctttgacttcaaatctatggtttcatctgtgtctcgggaaaaaaaaaaaaaagtccctgtccttgagaagcttgtgcatgtgaaaagtcctgcatgccactcctgagaaacagctgtcacaagtgatgtgtcagaggagtaagtggctcagactgtcaattttatagaaatattcagaggacagaagtttgagcccaaagtatcacactgtctccaaggcgcatcactagcatcggaagaaataatttttggtagctgagatggcagaggtaggtatgtcagcaaaagtccagaagcagaaaggatcctttgaagagacaagggagtcaggtggtaaagggaagttgctgagggatttagagagaatgtttcacatgcccttggatacgtctcagtgggtggagaggagccctggatagaatcaaccttctggggcttaccattttcactgctgccttctcttctttctccattcactgttgctaaggaccttaacctatcgtcaggctccttattcggggctctggttaaggccactcagtccccaggagctcccaggatcaagtgcagattctcaggctgttgttctagctctccactctctgtcccacgttgtgggatccccctggtacgctggccaccccggaccacttttcacccaggcctccactttgtctctctacttggagtgtctttgtccgcatttcctgcctattgaagtctaacttcccacgtcatattttagcttaaaaatgcgcttttcaagaatctgctctcagtttcccccaatcacaaagaattctttcttttcctgggtccacacagcaaatatctctgttagtctttttccacaggcagcctgcctgtgtcctcctcaagaccagggaactgtgtccttattccattacttagcacagtgcctggcactttgtccatgcttcatcaatctcttttaaaaaagaaatacatgaaaaagatgtccttgaaactagcacagctcagtatacatttactttaattaagatattaaggttcatcttagcacacatattgtgagtgacaaccatctgaaattcagtctcaacttacctgcctcctaaatggcagtttaatttcactataatctttatgataataacctttaaacttgttattagtattactgataaagttaaaagactttcatctggtaattttgtcttaggaaacattcaattattaaattccacactgatcattagaaaaccctattatttcataatgggctgggcaataccatgcaggtatccctcgattattgaaacagaagccatctctaagtgtgtggaagtgaaatctcatgcatcaaatagtctactcacaaacttgagctgtattagtagagacagatgggtgtaaagtgaaaagtcctctcatggtctgaaatgatagtgttttatggggatgaatggtgtttgtggctgattagtcctcactcttcccaaaacctggccaaactcaaggtggacagattaagccagaaaattttaggggtgtgtgtatgtgtgtgtgtgtgtgtgtgtgtgtgtgtgtgtgtgtgtagtagacatggtttacctcatggcaagaaggcttttctcatagagccactcacagataaaacacctttgccagacggctgcggtggttcacgcttgtaatcccagcactttgggaggccaaagtgggtggatcacgaggtcaagagttcaagactagcctgaccaagatggtgaaaccccgtctctactaaaaatacaaaaattagccggatgtggtggcaggcgcctgtagtcccagctactctggaggctgaggcaggagaattgcttgaaccccgggggatggaggttgcagtgagccgagatcacaccactccactccagcctgagctacagagtgagactctgtctcaaaaaacaaaaacaaaaaaaacacctttgcaggaattgacaacagaggctggtctagggcatggggaaaactcaaaaagagaacgggaaagtgtttcttctggtcctaaggaccccttccaagtgggaaaatatttcactctaactagacagtgccttcctgccctctgtgaatttttgccaaaaaacagaccaagagcctctgtgggcagttcaggagagcctttcagagtgcaaaggaagcttgggcaacaagtcctcccaggggaaacaccctggatctcagaaaggagaggggcctgaacaccttctcctgatgcttcccgcctcctctgatcccagcccacacagggccccaacccatgcagcttcgggcacgtaccttggcacactatggggatttaacacatgtttcatgatgttctggctgatggactgggaaaggaagcacccgaagccggggtccccaggagctctccctcccctcaacaggagctctgactcacaacctgtttggcactgctgagtcctctccggtttcctgaatctccctctctctaatgcaaaaagcctccatggcagatgttttagaacaatgatcacgtcaatgacgctgtaacccactactttctttttgcatcatagaattttttaagtgtttttgcagacttactctttaaggttaattacatgttttggattgagcctttgggaagactttacagtggtcctatcggataactgcgggccccaaggctggagatctgttaatagggtgggcagaaagggactgggagcgagactgggttcagaatctcaagtaatttggagtgtgcctagggattgggatgatttggctgggcattaatttgaaggtgaatatgcgtctagagattgcggggatttctttttcttggagggcaaccgtgggtgtggaggaatttggtgtgcagaaacagaaaggtctggttcgggcttcctctgggaaggcaaggccaagtggccaaggctgagaaggggcaggggcgaccgtgctggggcgggtccgcaccagctcctgggagcagagagcagagccgggcaaagagatggggttgtccaggctagggtgaggacgcggccggtgacagcgcgggtggggatcccccggggccggggcggggcggctgccgcgagccgggctgggggcggggcggggcggggagggacggggaggggcggggcggggctccgaggccgtctcgcaggctgcggcggccgcgggagaggcgtactcggcggcggcggagcgggcggcagagcagggcggcggcgactcggtgagcgcggcgcggctgggggcgcggcaggggcgcgggcgggggtctgcgggcgcggggctcggcctgcacggggcaccgcggggcaccgcgaggcggggcgggcgcctccctgccatccttctcctcccggacgcccctgcagcctttgggagggagggagagcggaggacaccgtccgggagcccttctctagcgatcgccggacagaggtccggctttgtgccccgttgccctctttctgagagggctgcctcctgattgtgttcctttcccagaccaccctccctcgtccctcactcacttaccccccaccccaggtatcataagctccattcttgcaggggacccctaacactccccttcccaccacccgaggccccggggtcctgggtactctctacagccccaaagggagggatggccccctccccagcccctgcacacctggacccttctgttgccacctgccacagacgttcttagccagccagaaagctgctgtgcctaggacccagcacaccttgccgtcaccctctctcctcccccagaacccagaaccccagtttggcaaaaggcacttttccaatactgagctttgggaacaatttgacccacttcccaaaatgctggtcccaggccagccatgctttttggtggagacacctgtcttgtctgccaggagacattctctgtcaaaatgggccagcccgtccctgggtcctcctccaagctgctcctactcgctagccagtgtccccagagaccagggccaagatctttgtcatttaaggcctccaaagctatttccccacgcatccccagaattcccccagccactgttttgggggtgccaggtccagaactgatggagcaatctttctgtgtccagggcctgatgtcctctcccacacccttgtttacccgcctgctccccagggaacccaagacagggtcatggggctggagtttagggccctgatctcccctgaagctctgtgaccctccttttctccctgttagaaactttcctctctgtcaccagtcactatctcctctggatgggacctgggccatctgcacagtgtcgagtccccagggcacagaatgctgatctgggaccctggaaggctgggacttgtgctggggcagcaggaggagagtggctgctagccaggtctgggcttgggtaccagagttctttgggtggatcattgtcggctttcactgatctctggttggggttcgagggcttgctttgcagtggagacaggaggcagagcaggggctgtttttcctgcgtgcttctgactgtcttgtgttgctatggtgacagttttgcctgtcttcctccttctgactcttctgggagctggtttttattggtccgttgtcctgtctttcatggctctaatttctcctttctacttgctctgaaataaacagtcataaacatgggcgctgggcccaggctgggggctggcagaacttcacctcctgctggccctgggttcctgtgaggggagagtgggaaagcgaggtggaaacagacctgcccacattccctcctgcctctgggctctggctctgggaagggggcagcagcagcatcacgggcttgggcacatagtgggcgcatactgcctcagtgctaaaaatagataccaaatgtggcaaaggacctcactggtgttatttcctttcatcttcacaatagccccatggggcaggggctctttccactttgcagatgaggaaactaagctcagagcaagtgagttatttccctaaggtcacattgatttgagcacacagtcagccctcagttttggttcaatgaatggaaaagtgatgaagctgacatacacgcatctctgttgggctccctggtcctgtccgagggatcacagggacttccttagtccagctgcctaaacccacactataggaggctctttagaaggtgtctccacttttcctgtccctgctggactactgtggagggagctgccaggaagctgtctggagtgtcccaagtgtacccttgacctgaactgttgaggaccccagctgagagcagagcaaagccacttgtgacttcctgtttttactcagcaccaagaagaattcagtttgcatttgctcccaggcctagatgcaactagataagtcagggacccagagtcaagtagaccctcccaagccagccctgggcaaggagttcatagctccccagggccataggggcacccactgtcagctgtcagtgaccctctccagtgaggctgttccttcccttccctggtgtttttttcttcagtacacgctcttcttttccattccctgccagtcccttcacattgccatgctctaggtttgttaaaaataagctgagcacgtattatggtagcacaaaaagaccagagaatcagcagcctcagtgtcaaatgttggtcctgagaaagtcagttcactcatatagcctcagtttctccatctttaaaatggggttgacagcatctatcctactggccacattttcttgttcttttaggatggcatagaatagcctaccgggaatgctttgaacactttgaaaggctgaaggacccataatgtcctagttctattgggagatctcaatcttaaagacagccctggaccactgtccagagattgaaaactaatttaggcataattaagctataaaatctcagggttagaggcatcctccaggggcattttgcccagccttgatgttgaatcctctaacttatttatgtatcttacatttattgagtatctgctttgtaccaaatacagttttgggaactaggggttcgaaaaatgagcagcatttctgttttcaaaaaaaaatttagtcatggaaaaagatccttataatacagttagacaggtggtatgataaaaggaagggcaggctgatgtagggcccagaggtggccacttgactaggtcacccatgagggttgaatcaggtgatttgtgctttggggctgaaatacatttgtccttccactgtccacttgaggagcaatggagtgatggttggagagccacacatcagcccttgtgagcagggtaggggagagaagcatggcagggagccaggactgcctttcttactgagttttgactcatcctctcgtagaagtctccggttccaacttcatcatggttagaatcttgtctcaggagctgcatgaattacctgacaagacatcatggtgattagaaagaaagtggtcttaagagtcaggcatgagttcaaactccactactgctttgtcttaactgtggttgaaggtgcatctaacctctctgggtctcaattcttacatctgagaaattgcagtaattatacttgccttctaagatttaaatgatcttatgtatttaaagggtctggcatggtgcccacttcacagtagacttgctgttatttagttatattgattagaaaagcgttctcagttactggacctctgggtccccttaaaaccatggtacaaagctctttggatgaattctagcctttggagatccattcattatctgagaaggttaaaaattgcccatgctcaggctcctagcactgctggttaattttcaaattattgctcactagataagctatgttctacaataccacaacaatgcacgaatcaccaacactctttttttcaaaggagaacaaatttgaagtggcagcaaacaccctgagttttagaaacatattctatctgtgagaatactttaaaatgaatgcctcgtattttttattctgagcatgttgaacttcttttttttaagttactataaacattaatatacatttttctcaattatcagtacaattctatgacattagtattattgtccccattttacagttaagaaaatggggaaaggtaaagtcccttgcctcgtgtctagaagctaggaagtggcaggaccagaatttaaagctaggttctgcttgctctttgtgccgtagtacacagcattgtcgtttccttggctggcgtgtcagtgacctaaaataattgtgtttggagaatgcaggcagattttaacaggggtggaaccagtcagtgttgtaactcagtctcttagtaaatatttagagagtttattaggattttgctgtcaccacagccttaagaattgcttctgcagttggctgggatgttatttctataagtgatgaatagaagaggagtttgacacatctgagttaaaggaaaatgtttgatgatgctagaagtagcttcctttgcacaagaatggattgctgatttgtcactgaaataaactgaacctttaagcaggccaagattttatgattgaacttatgaatggaaagcataacagttgctttccagggatacagagacaggagaaacaaggtcagaacatatggatggatggctcttcagatacaaaggtgacttggattcagtttatttattttttctttttttgagacagggtcttgctctgtcacccaggctacagtgcaggggtgccatcatggctcactgcagcctcaacctcctcagctcaagtaatcctcccaccccagcctcctgagtagctgggaccacaggtgtgcaccaccaagatcttttcactttttgtagaggtggggtttcgccatgttgcccaggctggtcttgaactcctgggctcaagcagtccttccgctttggcctcccaaagtgctgggattcagtctgtcagtacagctatcacctaggaagctggaggtattgaaaagcagttacagaattgctcattagcctttcttgggtaatttggaagcctaatttccctggcctaagaatcccatttcccccacgaatccaggtgctgagaatgggtgccatgtttcccagcagtgtgtttaccaggtccagcttagcgctgcagacagatgtgtttctatttgcaattatctcagggcctgagtctggtgtctgcttatttaatgacttcactttctaataaaaattctgtatggcatagataattagattttttaaatgaaactggggaaatggagtgccccaaagggtttaattgcagttttatgatggatcaagcataaaaatgagattattcatttgacaaatatgtacggggtgggttcttgctctgtgttgtgctaggatacagtgatcaatatgacattacccctgccctcaagtagctctccctccatgggagaatcaggggaggaaacacatggcccagtggagcctggccagtgttttacaaagtgcagtgtgctgagggaagagggaagtattgttttgactcttacttcaatagagtcaatttccctccacatgggcgctctctgtggaccacctgaattacacctgatgttgcatagagagggagcacgaaacagaaacacgcttgtcctggaaggctgcccacctaagctcagctgtcagctgcagtccttacttcctcgtaagggaagagcagatctctgtgcttcagtttcactgttggtgaaatgggaagactggatttgatgacttgaaagtgcctttccacatctagcctgatgattctaataagctcttggactcatttcctctagtgacaggtgaagaggcaaaacctagccgttttagttagcagggttgccaagagagagctgggatgcagagaaccaagtgtgttttcaaggaatcctctcaaggaggcgagaagccctgttttccttcccagaaagggagccactttctggctgagcatcctgataaaaggctgatgacagtgggaagagacaagcagagacacaggagtggcacagagggaccagcttactcccatattccagagccttcaccacagtgaatgcagaagaaggttgacctcacagatgccttggttactgcaatgtgctcttctgttttaagttaatgttgctttttaaaaatcattatttggtttgatgattcctgagtttcaaaattaaatgcacaatcatttttcgatcatgaggaacaatgagtgacaagctcttatcccaacactcttcaagttctctcattcgcattggcaaccagatgcaggcctttccagccacggtgatgaggctggctcccagtcacctcatgtgagaagcttcatgctgtggttggggcaagagcaagtggagagtccaagaagacccggggtcttgtagtcacgctgcccacttacaagcagcctgggctttgacaagctgtcgatctcctgagtcttgtgttcctactgagccatgtagggtattgtcagcaggacaatgataaacattttgtacccacttttagcaatcttctgaagaacgtttgaaacagatattatccccattttatggatgggcgaatggaagtccagaggtgttaaggaatttgcagaatgtcacctcattagaaaagtggcatagctggtatctgaaaccacatctgtgtgccttcaaagcctgatctctctgtatcacccacactataaacaagagctgtgcatatgtgaggagcatggagttaattagcatgtgtcttgggtagaacactcatctcaaagagctggtgagtttctgctagccagaggagcctccataccttagaactgaatgaaatatagcttgtgtttcaagtgcttccctgtgactggtgtgtctgtgtttggctgacgtccttcagggtgtcctttgctcagcccacctccacggaggatgccacacagaaataatgagctgagcctgcactgagtgcagtatatggccttgttgagctgtggatcgctcccagttgaggcaggtggtatccaacttacttctcaggcccttccttggtacagcttgcagtcatgggaaggaacacaagataactatgttctcagcttacagagtgacaggcatgcatgctgatgaacacccctgctctttctcctctattccacagaaactgggggattagatagctaggtagatggatggaatgaagagaaaagaaaaggaagagaaaaggaagggtggaaggaaaagaaaagaaaaaaaggaaaggaaagaaagggaaagacaggaaaagaggaagaaagagaaactgagaccagtggcttttccaaggctgagacaagaactcagctaccacagctctctgaaatccagacaagtgacatctgctccttgaagttctggagcaagtgtttggaagcaaacagacctgggttggatggaatcttggccctttccttgggcaaattccttaagcttgctaagttttccagtttgtgaactaaagttaataatgtttgtgtctcaggaatattgtgaggaatatgtgaattaaatatacatccatcttccttctggcctgacctttgaataaaatttgtttgtaaagtttttgctacgtcctctaggttcctctttatttgtttctctgggtgggaaatgacgtgaaacttgtcctttctctgacaacacattcctgaattgtccctgaaaaagccccacatagtcaacccctctagacttctgtttctagctttcgagctttcaatttatgcctgaagtgaacctagccacattatttcctagattgtaacaaggataatgattctcatcagcatcaagcactgtacatgcactatatgatcaatctccttatcctaagtctttttcttattttttaaacatgtattttttttctggagtcttgcagttttaaatccaggtccttgaataccttcagaattaataaatggggtcataagctattttttgacacatacacattcgcttatttttaagtccaaaatccaaaaagctctgaaaatgggaagtttatttcatcatgcatttgaaagcaaaagctggcccagagactctataacttttatgtattacactcaagatgaatgaggttttcagcagaaagataagtgtcccagaccctgctgggcatgtatgtaatacatggcttatgcactctttacctttctaaaagacatttctgaatttggaagcacatctgagcaaagagtctcaaagaaggttttgtggatcttgcagaaagcctaaaagaactgactgtgtcggcaaagtccagatgacacaagtgaatatcctacctttggatattagagggtatggtgacatggcccatctcatgcttatcaaaagcattagtggccatttttatattttctcaattaactgaattaaatgaccatgcttggcacaaaaacaaaacaacagccaaaaaaaaaaaaacaacaaaaaacatcaaaaaacatgggctctcaaatttcactgggacaaagtcattttaaaaaaaatttcctgagaagtaaaaataagctgggaattttttattgagtgtggcttataattaagttttggttttggccttggagggggatggcagagggaatttttaaatcttactcatcattttgcccatgtgaggaagagccagggctgaaagagtgagcatggggaagtgaaaagcctcagccgagcgtgagaacattttggttcttattttgggtctgttctttggttgtaaagtgagcttgagcttgtcacttctcttccttggcccctaggaactgagtttctaagtaaatgacttcttcctttgtctctctgagaattaagacatggaggctaggacgtcaaaagaggaggagagtgggaagcactgagctgtctgtctggctgtactggtaacttctgccagccccaggctgacctctggagggatgtagaaagtttccctgtgctctctgctgggttccctctcgggtcttcctttacttcttccacagctctagtgtttctgtgcctttggctggttgcctcagatgtattttggccctggtgactcgactgccattcacgccactgacgctcacgaggtctcactggctgcttgaccaagcatggccattggcagtggccctaatggcaacggccattccagcaattgctctgcatttctctcctgttttctctttctttatgtctttgtcttttgagtttattattaatgcatcataattctgacattttccagatcaaaagattaacatttctttcagaatctgatgatgtttaaaaatcagcagctcctcctctctgaggacccactgtgtccttctggaggagggtctcacccactcacaaccagtgatagccatgtagcttccaccacggaggagtgaccttaacttccaggatcctgaaggcctttggtttgcatagactattggagccactagggagctgtaaatatggttcacatcagcgcacatggagaatagggtgcctctggggatggctggcccttagaaactagagaggcctggacttgtgagtgtataagtatgatgtgtgtggtttgaatggatgtgtgtggttggaatatatgtgtgtttatgtgtggcttgtgagtgggtgtgtgggtgtggatatgtggatgtgtatagctgtgtgtgtataggtatgtgtgagtgtgggtatgtgtgtgtgcagtttgtgagtgggtgtgtgggggtgaatatgtggatgtgtacaggtgtatgtgtaagcgtgtacatgtgcattgggggaatccttttcattccaaggaagagctgcagagggcaggaatctgccaggcactctctggacaaggctctgccctggcctttgtgtagctcacaggtggaactgactactcagatgcccctgcaagccaagggaccttttgtctttcaaggaccggtaaccaccaagaaaggcaattctgacattaactggcagaaagcaactgaattacatttcttagggagaaatatccaattctgctgcttcagaaacatagaaccctgtaaatcttatgctacacatttttaaaacacccaaatcatttgcatatgcgactttagaaataaaaataagtgaaagaaaaacccaattcaggtttaaaaaaaaaagaccaagaatgcattcaattttatgtaatagtcagttggggaaagtaggaaaaagattatgaaagagaaaagaaagggagggagcaggagaagctgtgctgcagctgtctgagcccctgcgtgatcaggccgtgctccagttgccgcacatttacaactccttcaggttcaagttctttagggtcaagcccaagcagggcttagcagagttgagacactggatgtgagggagaacgaacagaagagaatgtgaaatattgttgcagttttgcttaccaaactgcggaggatcaggaagaccatgtgggcagtggagtgagcactgtccaaggagtcccctgggtataagcctagctctgccactgaccttctgcctaacttgttgtaagcctcctcccctccctgagcctcagttcctccatttttaacaagtatgtttgactagatgaagtctaaagccattcctgggttggtgaggcaagcccacacactaggccccacaccccaagcccagaggcattctcaagatggaagaggagattgttcagctctggcctgcaattactgaagcaaagagccctcttccccatgggtctgaattggggtttcctctttcatcacttggggcgagcgagtgagcttgtacgggtgtggatggagtgctaagtgcatatctcctgttttttctccctttaaaacatctgtgtgtcaaggcctcgtccctctttctccctttcacactacatgctcaacctgctagtaaggtcataggttgtgtaaatttatctgttaaacctcagattcaggaaatagattgagtagctcatagaaactaaaatagctacagtgtgatcactatttgtggtatatgaatgtgagttatttttttctaaccagtgacttatagcttgcccagtccagtcatgacccttaatttttcatagtattcccaaatttttaattatgttaacaacagtgaattatgctattcagtatacatttagcacctattaattctaactatttggatagtatttttgtatacattttttcatcccacagacaccttctaaggtgatattttcatttcttttttaaagataaagacaatgaagctaagaaggttttttttaaaatttgctttaagacataggactgaaaagggctgaaaatggggcaccaggatttggttgaagtcggcctggctctaaaacttctacacgtttccataccacacagctcgcactgcttccaggccacaattttatttttttttaaagaaaataaaatcctttttcctgccatgactggagtctcttaagcctcagaaaatatgatcatagcttgatttctttgcctttttccagaatggagtcccatggcacgccctaccttaatgtaaatttcatgcaaatagtatatggtatttctacttaacaaactttgaccatgtattcccaaagtgccagacagttttctggatacttccagatgtgtcattcgatggaagaagaagttgtgctttttattttatagagagcaaaaccaagactcggagagatgcaaacattttggcttgcttggtgaatcagtgattcacaggctgcagttttatagagcgcttggggttttgccttgccctggaacagaaacactccttgttgaaccaggagatcaagctgacccaccagctcccacctcacagggctgggcttccccagtatctgtctgctggtcataactcaatctgctggctgtggagaaaggcaacttcctcttgtctcttcccatgttgtttcagcctgccccactactggctcagtttagctcacccaaagtccattttcagtttcatggctcatcatagacttgcaaatactatgcgttagcttcgtattacagaagagaaaatggtaatgtgatttacgcaggatcacacatgagctacatcctgttttcaaaatgccctttctttgcctggacagaccctttgagattcgcttctggtgtaacattcgccataaaccttccccaggtccccgtcaaattcatccgtccatctgtccatctacttattcaacagatacttattgagcacctacaatgagttgtgcacttctctgggtctgtttctggggattcagcagtaaaccaaacacacaaactccctaacccatggagcttatattttgttggggaaagatggaccataaacatataaacaagtaaaatgtatatcatgttagatggtggtaagttccatgaaggaaaatgaagcagagatgggtatacagaaggatgggtggatgacagcaagtttggggaaagagttgctattttaaatagggttgtcagagaaggtgaggattgagtgaaggcctgaaggacgtaaaataatcattgtggataattgggggaaactgttccagtctgagcctcagcgagggccaaaccagagtggagtgtgtctggccagatgaagaaactgcagggaggccagggccagagctgagtggacaagtgaccggttgcaggccatggggtcatggagacatcacaggccagcctgtgatttcaaggccctcctggcactccctctgacccaggatgtttttgctgtctgcagttcactggcctgttctcatgctggcctgtgcaccatgcaggacaggcccaggcttgtcttcaatcttcacatccccagcacatagcaaagggtctgggatagaaagagagcccagcttttatgaagacttctgctcctatttatttttttaagtccaagagtcctagttaaatattatttgtgatttttttaaataaacattggaactttgaagaaatgctggctgtaaatccccattaaccagctggacaagcatcacatgggcaggattgctaaggaaaggataaggtgccaggagaaagctggaagtgaaagctgtggagaggagagtgttaattggagtccagaggaagagggcttcttcagaatccccggggattaactgctcatccgatccctgctggggactggtgtttataaaaactgaccgaaggctggaacagggaagctctcgagaaaccctcaaagtgtgtcaggatttcagccaagactttccactctccactttgctgacgcagagggtggcagggggtagcagggggagtctgtgggacccggaagacttcatctctggagacctttccagaaggaaaagaacctcccctggcagggcctttccctttacagagcaaaatgctcatctcagaggagcttgaatttcttcaaatgcagggaaaaatcctagcaaatataatagggtatacggcaaggggagagaggatggctaagaaaagcatttggccccagtgaggctcagggacctctggaggctgccagctcccacctcgtatcctctgcccatctgaatcctgctcctcaggacaaaaagtggcttatagcaacttgtagcaacttagagcaggtgggacaagtagctcatagggttagagtgtgaggggggtaggtaagagctcactgaagacggaagctagaggacatcctgaagctgtgggaagatgttagggaattttcacaaaggaatgatagaaatggatttccaaccagaagtatgtgtgggtgtcaaaggatggaccccatagttacaaagttgtggagtgttcattaacgagagctggggagggaagattgctttcagctgctggatcaggtagtaggtttgcttaaaaatattaaaaagggaaaaagcaaagacttgccttttccttattcaaaaactgttttttgagaactgactgtgcttaggtgctggggttgttctgacagataaaccccttcctcatggaacccattccaagcagcctccttgaagaaccttatctgaaggtacttgacataagatgactggaatttcctgcattcaactgcatattacaagtttttaaaatggggaaattaaaaaaaaaattcacggcacctgatattaaaataataaaaagttaattcttggtctgccaatgacctgctcaaagtgagtggacagcctccctgggtcttcatctcctcatcctccagtggagctaatcttccttcctgcctccttttcaggaatattttgaagacaacaagctttgaaaacaagttgaaagctctgtataaattgcagggcgtgactcacatgcctgtgcgggacccatgttcacaaggtgctacctggtgagaggttttggatgaaggatagagtctgttcacagatcaatttttatcaactttacttctccaggtttgtctgcaactgtttagggattttttccagctgtcagaaatacttttcctgattttatattagtatttggcttctgcactgcagtgcggtgctttacaaacatgcacacgtatatgtttacctaatttttctaggatgataatttaatgtagttgatatgacagtataagaaggcaaaggccaggattgttgctccaggtacgaggaggcttgaaaacagcatctgtgggtatacaggagtgggaggtgttagaagtcagcctagcttgggtcagggtaggaaaccaaaggtgtgaattgtcatgaaaagccacatgcaaggtgccaaccctcccagaccccccagaaatagctgttgaaaattgggctttctggtaaaaagatcagctgctgcagaacgccttccatacatgtcagcaagtggggccggatagcatagagcgagcctgaaatgcgtctaaataaatgattatggtgactcactcgcccccgttgaatggaatgtttttttaaagtgaaagtaagagagaaagaagataataaagcaaagaaaaagaacaataaggtttgaatttaaaacaacaggagcaaaaaattgaattagtcactcatgtcaaagcctgtgagcctctgtcctgaattgctaccttcctccttgacttgccttaaggtcacggtctttctgtttgaatttcctggtgaaataacacaccctctgattgttgccattcccggtgccggttgcaggcatgtaatgggcattctgagatacttgtcacagagccactacagagcttgtctgttgagctcagaaggcctttccatggccagagaggagcatccagtctctctgagatgtttagggttgctttgtggagcctctgagtgtgagagctggggctgccagcccatgaagcttaacggagaaggttctgcatttgttctattgtaggcctcttggtctgttgttgcatcatccctgatatcaggaactggcccagagaccaatgaaacctttatgatttgctagtgttttaatcgatctgcagtttgcagagatttttatattgaagtgagtcagtcttgttttatactatatactcattcagctgagtatatagctttgctcctctttttggttgatttctgggccattgcttaaccactcttacgtcttagggatgtcatccataaaattgacataatttcgtctcagcagaccccaacataatacctgtgaatataaaattatttaatctggaaaaatgtggagtatgtcacttttgctgcagtcagaaataacccccaaatctcagtggctgatggcgacgactgtcttgctgtgccacgtgtcaggggctgcaggttggcttctgtggcactggtgtacatttcttctcattctggaacctgggctgagggggtgtgtgcttcttggaatgtgtcatgctcatgacagaagcgatcgagcaaggtggcagaaacttgagactcttgttgaaacttctactgggatgtggctttctttattctattttcactccatttggtaaacaaggcaaatgtccaagtcctataccaattgtaacctcctcccagggaggggaagtggtacatccaagtcatctggcaaccagcaggatggtactgtacaaccgtgctctgtactgtataactgtcccctgtactgtataaccatgccctgtactgtacaaccgtgccctgtgctgtatagccatcccctgtactgtacaactgtgtcctgtactgtacaactgtgtcctgtactgtaactgttccctgtgctgtacaatcatgccctgtactgtacaactgtctcctgtactgtacaaccatgccctgtactgtacaaccatccactgtactgtataaacatgccctgtattacacaactaactgtcctctgtactgtacagccatgccctgtgtactgtacagccatgccctgtactgtacaactgtcccccatactgtataaccatgccctgtactgtacaactgtcccccatactgtataaccatgccctgtactatacaaccatcccctgtactgtacaactgtcccctgtagtgtacaaccgtcccctgtactgtgcaaccatcccctgtgctgtacatccttcctctgtactgtaatcgtccctgggagagagaccatccctctcccaagatatcaaaatctgcagaagatcaagtcccttatataaaatgacatagtatttgcatataacctatgtatctcctcctatatactttcaataatctctagattacaatacctaatacaatgtaaatgctaagtgaatagttgttatactatgttgttttttaaattttcattatgctttattgttgttatttttttatttttttttctgagtattttccaacctggtcggttgaattccaaggatgtggaactgtgaatatgaaaggctgactataaaatcttttacaattgaggaaataatgcagtgtaacaagtacattgtaagcttattaaacacggtgtgaacattatgttcttagtaaaataatatttgactggatactaagaatggagcttatgtctggtatcaatatttattgggaaatatcacactagaatgtagtggtctatgatggaggaaattttgtgtcacccacccctacattttaaaagcaaggcctagaccctcttcttgatatatagtagatattcagtacatactagttgttctgagtaaattcatgagatcacagctgctccaataatctgggaacccaagacagtaaaatataagccaagtctctgaagtctatttaagattagaaaacagcaaagccaaattttcagctgcatgctagagagataaacaggtttatcaatttatttcttaaattcaagtgtaatcacatccacaaagccttttgctgaaattccccttttgatgaaactcgtgtcatcacatcaaataactctagtggcacagacttaactcaaggtccccagcattgttgatgggcagtggccttgacagggacagtattgacatagtgcttttgaccattgttgtgtctttctttggggctgtcccaaatgcttactattcattacattctttttttttttttttgctgttgtcattgttgttcctaccctgtcttcctgggagcaatggtagcctcttaaatttacaaacaaccgaaccaaggcaacaagatgtgagggcagggccaggctatgcagtgggtgtggcagagactccacccccctggctgagtttctctgagatagataaaaccacctgggacacttctccactcactagctgtgtgactttaggcaaattacttaacctttctgtgtctcattagtcagattaatggaatgaagatagtaatagtagcattttctcttaggggtgctgtgaggatttaatgaggtgatacatgtaaagtgtttacagcccgggaggtcagggggatgagatgagcatcctggttggacagggccgtgggcctcaaactactgtagtggtggctccaacaggagcctctcagagtattgctcattggaagcacaaaggccattcacagggacactgtcattcaccttgatatgagtgggtcagggaaggcagtctgattagcagacacctggaagaagtgtttgaactgcggggttgtgggggctgtgtgagccatgccagaatctgaaggaaaaatgtggactgtacaaggcagaggagaaagaaagtggggagagcccaagatgagagtgtgctttgctaattcaaagaaaagcaagaggtcagtatgtatggctaggagtaaatgaagacagcagtgatatggttcagagggagactggacctgcagggccttgtagtatgggttttgatcaaggagaaaggaaactggcacttgctgaggacacatcgtgtgctaagctctgggctgggtctaatctttttaataattctgcaagagcagctggtacagatgagaaagaggagcttacattcttgcgtataatcaatcaggtggctcacacatggcaaaaccagaatttagacaaggtcttttggatttcagagcatactccagacctgcttcaaatttagacatttgttaattatctagtatttgaatatacttgtttatttctttgcttcaagtcaactgagatgatacaggaaagctaaatttcaactcgctaatttgcatgaacacaattaatgactgtaaaaaatctttttggaaggaagattgtaccagatatggtttcattgcttgagcaaattaacacatcccctgttacctggtatgcattaatctgggttcttcagataaatagaaccaataggagatagatacggatacggatatggctacagatagaaagagatttatttaagtaattaaccaacatggttataggggctcagatgtcccaagatctgcatctggcaagctggagacccaggagagctgatcatatagttccagcctaagtcagaagggctgagaaccaggagagctgatggtataagtctggttcaagtctgaatccaaatgcaggagaggactcatcttctagcttaaagacacagaagcaaagagagaaaatcccccccctttaattcaccttttgttctattcaggccttcaagggatctgttgaggcccatccatattaaagagtgccacccactttactctttctactgatttaaatgttaatttcttccacagataccgtcacagcaacaaacagaataatgtttaaccaaatatctgggtaccccatgctccagtcaagttgatacataaaattaaccatcacaaataccattttttatgaatgtaagtacaattaaagaaaatgtcaagtcgcaacaaggaggctcccacactgcacgtggcttctctggtcttgcagggaggcctgagcttgcctgccccagagccccatttttccttgcactgatcagcttctctagattcctgagacttcttttgcctatacaagttctctccattttcaaaagctctgcctcataggacaactaaacaggcagcattctttaagataatcttgataagggattttcaaaatgtgctatgtcatggctgcatggaaaatggtcatatttgtacagcacacagaagaaatggatgaagctgcttgtagccacagggtagtggcctggtgggggaggatgaactctagacatcttgattctaccaactgtctccttagaccacaagtgtacctttgctacatggttggaaaaatctgattgaaatcaagccatccatcttataggtgggaatactgaggcccagagagggaaagactagagctagagccacctccttttctcctgggacctgcctgtgcagttctggtcatactgcattgcctgtctgatccttttctgcctcctcatttctgaattattcattgggcatttgtcacaaactgtcagggacagctgacttgtgtgggtgtgtgcgtgtataagcacatatgatcttttcccaattagataataaatcatctggggacagggtctttttcgtgttctctttcttttcttataccctccaaattaccaggcatatcaggtcatacttttctatgtattaaagtataaatgaataatcatccatcattagcctttaaaataaactgtagcatcctcctacttcaaatgtcttttcttccagaaagtatttgctgatacctagctgtcaatgatctctggtttgtctcaccttccaaagcattttctttgtgacatcgtagagcttttactgctttccaccttatattagagtcataggtagaaatatcccatctccttttccaatgacgtgatcaccttgaaggtagaatacatgtggctcgtgtaatacagtggtgtttacttcacaggcattcaattctaactccgcattttaaaatgtctattacatatcagatactgcactagccgtgtcattgcaggagctcatttaaactccacagcggctatataaggtgcatatccgcttcgtttttattatataaggaagctgatgctcaaagaggggaggtacctagttccagactgagttgaagccaaacttctggttccaaatgccatacctttgttttagcccaggatcgttgcctgcttatcttagcaaatgtttgtggaataaatatgcaagccaagaataggtgagttaattcatttgaaggctagcaaatgctgaacataagtcatttgtggcttttggaaattgttgtgaaaatacctttatactgtaaaaaatgaaaagaacgttgattctcatggatcacttctgctcgcctatggattgtccctgaaacatctgcaagttcaattgaaatatgactttcagatgaaagaatgctatcactgtcccaaggctttctttcctgatttgtaccaacatcaaagtagaagtttatactttttcattttaatggtaatcggtttccttaataagtcttgtctttaagaggtaaattcaatcagctgccgtctgctatgagactgagtggttgtggctccgtgtgtggggggttggtggggcagggctgtctttatttttctgctctattttcttcttatttcccttagcaataattgacccccttgcatgttaaagactcccgcaaaggtagaagaaggaaggcatgcgcagtgatgctggaatcatcttccatgtggttatctaagtgtggcctccaaggaagttacttctagagcccagttaatttctgacttaatcagagcccggaagccccaatcatgcttctgaatttggtaatgacaagtgtctttgcaaacatctaggaagaaaacaagcttagaggaagctttgacagacaacagtagttaagccccagcaacagtgtgacagatgccagctggacagtgtgataggctcctgctcatgggtggacatggcaaggactgtccagaggagaaatggtcacctgaggctggaacacaacaagggcagtcttccagtatgactagacactgaagttttcatgactcagcccatccaccaaagggactgatcttaagagtttcagtcttaacctccctgtgtggtgggacagacacagcaactaattgggatgtgtgattcactcacatcggctctctacctggggtcaaaccaggcattcaattctaactttgcattttaaaatgtctgttacatatccaatactgcactagctgtgtcattgcaggagctcgtttaaactccacagcagctatataaggtgcatatcagcttcgttttattatataaggaaaccgatgctcaaagaggggaggtacctagttccagactgagttgaagctgaacctctggcttggcagcagggtagagagccctgagatgttggcacagagagttgaggagtggcctttattatgccgaggcctgcaggtagatgagcttgatcttcagtcatcagatacttacggaatgtctgcaggcactgtgcttggcactggggctaatgatggttaatgcattttctgcccataggtgaagcctagtggaatgctgtttctcaaaatatattctttgatcatggaacttgtcctagcaggagatgctcagaaggcattcattcatctcttcattcattgtacaaaggctctaaaacactatgtctgggtgggctctaggaacataacagtgggcaacactgatgtgagcctggccctggaagcctgcagagtgtctgattgtgggcgaatacagatagaactggggatatgatctttgtaatcattttaaaggtgtgaatatatgtgtaatgcaaacaaaattgaagagggaacgtgtacacaattattaaccaactttagtgtgtttcatttacatcgtgactgtgtgtcttaaaagtttatgtaaaaagcattgctgcatattgaagtctctcaaaactgtccatggcaggtctgggctcagcagtgcttctctagtggcatcctttaatttaggcaggcttgtgcaacactgtcccatcttgaagtattgaagaagactgtatctccaggccctggctcctcaagctccccctgcctacaggagcctttcagctgcctttctctgtggctcaatgccattcattgtttaagctacggttcaaggatgaacgactaaagtgattcattcctgtatttgacagatatttattgaatgcctacttcatgccaggcatagctctaggcagtaaggataagacatatcagttaaggaaaaaatgtagatactaaataataactttaataatgttaaagtaacaataataatattttattatggtaataacattaagaaaaaagtactaaagtaatgtatttatcttatttaggtaataattatattattatatatagtatactattataaataataataataactttaaggtaaggtaataaaggaatatttattgccttctagtatattagaaggtcaaaaggtcaatgggaaaaatggagccgaaccaaggagattatggctgttgcagggaaggccattgcagttgaaaagggcggtcaggatggttctcattgagaaaatgacatttgagcaaaaactattaaaaggtgaaggagtgagcacacatatatctgggagaaatgtattctaggcaaagagaaagggcagtggaactgacagatttgaggacaagctaggaggccaatgtgatggacctgatagaacaaaggaagaagagtagctgtggatgaggtcggcaaggtcctgggggtccaccctgagtctgatgaagggtgctgctggagagcgtgttctagcggagggtcccagtgggactcacattttagtggcatcactctggccactctatggcaagaaaacaacagggtgtcaggggtggaactgggggaccctggcggcagcgtgttcttgatggactagtatggaaggtatgcagggacgctggatatattttcaaggtaaaggcaaaagaattttctgaaagattgaatttggggcgtgaaataaagaggaggctcagatgactcactgtttttgtcctagcaactagaaggatggaattgtcattagctgacatgagaaataatgtgggtagagcaggattgggaggaaagaggaagagttctgttttgggccacgctgagtttgagttaggcattggagtgtagcttctgagtagactgctggttattgctggcaagggagaggtcaaagctggaaatataaatatggtatttatcaaaatagagatgatatttgaaggtgtgaaactaaggcaagatcaccaaaggagtgagtcctgataaagtagagaggctgaagggccaagtcctgggaagtgccaatattaagaatttagaaaaagagaaagaggcaaccaaagagactgaaaaggagcacacattgactagaaggaaaattaagagaccctgacctcctagagatcaagtaaataaagtctttctaaaagggatgataactcaattgtgtcaattattgctaatgggtttaataaagatgaagagagagttgaccattggcttcagcatcgtggagatcaccatgtcctctgctctcacccccagcccacccagcctgcctcctttgcatgccatcatggcatgatctgcttatgtagctgcatctcctgcaaaacatttttctgtctgccatcctgcaggcacgctcacttgtgtgcttatgcaacattggtgagcacctcccatgtgctagatggaatgagtatgcaaagttaaacttggtatttttctaccctcagatgtcttacagcctaaggagaaaagcaaggtgtctagaatctgttacagcaaaagaaagggattgagggatagtaaaattatgagagttcagaggacaaagaaattttctctgggagtcaaggttgagtccatggctgaagtggcctttaaattcggccttgaatgctggataggatttagaattaaacaaatggaggagaaagaagaatattttagaaaaaggggcatataggagtaagggcatgcaggtgggaaggctggaaaggggaccctgggctgaaggcgtggcatacggaggagaaggaagagcggagaatgaggctaggatttgggccagggactcaatgaagagggccttagaaaatagaagctgggctttatttcttagtcagtggaggaatcattaaaggtttttgagccatagagtgatgcaataatagccgtgctgctttgggaagagtcatctggctgtgtgtgcagaactgtccaggagaaagataataagggcctaaattagggcaacagaagtgggagcagaggagggggcggatgtgaggcactgtaggatcagagttcacgggctcagcactccagagggataggcacatggtgtggatctgggtccctgggccctccctgagaaactcgtcagccttttgaggtcagtggcctcggctgtcccttgtgcttgtcatccccacccccaccccatcctcttccaagcccatgtgtgctcaagcttcacctcgttaatgaaatgaagctgcttatttttggaactctgtgattaacatagtttctgtgtttaggaaacaaaagaaccctgtgcatttcaggactctctacctgcactgtgtccacctaaaaaggtgagagctgacgcatccaggtcatctctggcctccaatctctgatcttctgttgcacctgatctgatccagtgcctgcagcatcaccagtaattttgagcaaaagcagctctggaggcccagagagggcgatacacagtgccacccaaccagcagcaccagaggaaaggccaagcaaccagatggggctctccactctgcctccataaatctaggcaggctgcctgcccattttccctagaaaaccagcctagtcgcttggccaattgtgccagaagatggaagccctctcaatgccttgtggttctcccagtccccagccagggccagctggggcatggcaggctatggcccccaatggtatcatcactgatttcaggaggctagaaccctagcgctgtgggggaggggctggcctgctgccagtcccagcatcccaattcctatggcagtgcagggggaagagcctctgtgggggcgaggctggcttcctcctgaatctgcccataaaaggataaaagtgctgctatctagtcggcattggtaggattgctgatgataaattttttaaaagtgtggatttttccccctttttgcaaggatgtgtgtgtgtgcgtgcaggcgcatgcatgcgggtgtgcctgcattcacacagtttgcagcctgtatgtgctaacagatggattcagcctcatcttttatccggtgttacagaagataaaactgaaactggatgatatgctgcctcttcaatttaaaagataaaaaataaaataaaaaagctcttaaagggaagcccttatggtggaaaagagtggtccaaaatattgtcaggctttactcaaaaggcaaagaacagcagagccattcgaaagtaatttttctccctcctccctctctgacttatccaaaatatatcatctatgtgtcagaagtagggcaagctttaaggctattatgaattatatatcaagggatatcatttcccaggagtcttgaacaaatgcccaatggtttaaattttacagacacgctcttccccccagtggcagcaatttctgtcactgcagtcttcctgagatggaatgggaaagtgttttgcaaaatgcacaatgggacgttatgctaataaaggtaattgtgcagtggttggaaaccattccttcctgaaagaggcttttatcctccacagactgccccacactgcaggtacttaggcagcaggctgcttccactggtcttgccttcttttagctggagtcaaatacatccagggtgagggcagattgaaagagggaaactgaaatcaactgggcatttctgtgcccatcgtgtaagacaaagaccttgccatttcatctgaatatcagatattctttgcctatctatttattattctctaagattcaggaagagctttgtgaaagtcattcttttatctaaaattggaaacatacattcattggcgaaataagaaaggtgggtttgagggtcttggtattttgcttccttaccgctattggatggatcagaaagttagcccagaacatgggagacgaggacgagcgattaccagagtgcattgctgggcagggccttccagacagtaacagcgacagctgcaggaagtggctttctccgctccatgcttcatactctccctcccaatttattcttttgaagtggatattttaaagttctgagcttttctgtatgcagccttgagagaatccagatataattatttatgtaagtttgtcgttttcttaatctttaataattatttattaattatctcactttattcttataacacttttgagatatggagggcacatcatgtttttcctattttagagagaaaataattgaaggcttggtgaagtcacttgagtaagggcactactgccagagtagtgatattacatagatacagatatagatctacacacacaacactccacactcacacgatataaaatacaaacctgacaatagcaccctgtctctgcaaaataataaaaggtaaaaccctacgttcaaaatgcaggttcctttacaagtatttgctaggccctctgtggtccgcccagcccctgcctcatgtgcggtgcaagcctccctcccagtccaacccatcaatttcttatgctccagccacaccccttcatgcagagttcctcacatgaggaggtttgtcacttgttcattttcaaggcccgtgctctgtgcctgaacaccctattcctacttcacatcctcacagcatcccttagtggtgcatggaattcacactctgattaggccccagcccctccaggaagcttttcccggccagatcccatcacacaggtggagtccggtgcccaccacggatgcttccacaccagcctgtgcaactgccacactgtacttaatcgtcatttcctgtgtttatatttcctggaagcttacgggctgttagcaaacaagatggaggtaccataccttgttctctgaatcttcatccccaggggtggaagaaattcaggaaaccagtaacagcctgcagggtgggctccagtgagattccttctccttcttactgctcctctgtctgaatgaacctcaaaggctttacctaacaggtaggcttcggtaactgtgtgctattcaggtgtgtggctccttccaaaccccaagatgaggtcacaactgccaccccacccatcaccccccgttacccaggccctcagcaccacacttagcagacatgttaatgaaacatactgatttccagggtctgtggcatctgattggtccctaagtggacacagtccctggtgaaggacacagagttcaggatcagacacccttctgccattgactggctgtgtgatgtcagaaaattcacctgagcactctggacctttgtctctgcatcagtaaaatgagagtggtagatgctacttgaagctattttgttaatgagagattattttgtataatgaaaggtacataaatcatatgcataagtatttgccattattagcataaaaaaattcaagtttgcaatccaatatattaggggtttgttaattaataatatgtggcaaaattattttgtcattactgaagaagtcattggcttagtcagttcaggatactgtaacagattacatagactggagtacttaaataacagaaatacatttctcacggttctggaggctgtgaagtccaagatcaagatgtgggcagacctggtgtctggtgagggctggcttcctggcttgcagatggctgtttcctcattgcatcctcatatggtgaagagagaaaaacatcatctctgttgtgtctcttttgagaaggccactaatcttattcacaaagctccatcctcatgacctgattcttcccaaagaatcttccctcacctccaaataccattacattgggaatttaggctccaacctatgaatttagggggatacaaacactcagtccctagaagtcatcttgttgctgctttagatattacaacttttaagttaaaaagaaaagagtttgatgagcactgcaatcaaagaaatccattagctgtttggccaaacagatttctttatctcactcagcctgggcatcacaagatccactgtgctgggatgtggatgtgaggaatgaatgacagaggagtgatgaaaggggccaaactcagcccaggagatagccagctcctggtgtgtgggggttttggaaatttcttttctattttttgttgtttgaaatggggtcttgctctgtcacccaggctggagtacagaggcatgatcatggctcactgcagcctcaacttcccaggctcaggtgattctgccacctcagccttcctagtagctggaactacaggcgcatgccaccatgcccagctaatgttttgtatttctttcttatttttttttttggcaaggggttgggggagagataggatcttactacgttgcccaggcaggggtaatttctttccctgaagttgtcctacttccaacctgtggccctaggtcccagatggattgtaaccagcttgtccggagttctgagtaagccttgcagagggagtgtagagacctcaacaaaaacattttctctgaatagataggtgactcagcactggacaccaagaaagctgcatttagctgaaagtcagtaagaaactcgggaccgggcctggggcagttggcctcctatcctggaccatgagctcctcattcacaaagcaaggggctgggcagagagttgcccaggtggcttccagctctggcattcagtgcatctgagtgagttgtcatttatagaccaggaagggcgaaattatccccattaatctgctcacagttctggtgcttgagaagccactgggtcttgccacatctcgaattagctctgggcccttgggcttttaattaaagggctttgtgagtcagatggtttatggtcagattcagatcttcagggagacacagagggaggtcctgtgttctgtcatctgcttgtttagaaatcagctgccactctcagtgtgagaactcagaatccggagtcttgcaagggacttccagcaacggctgtggttacacctcaccccctactttcgctgactccagaccccagaggctgagggacagtagatatgctgcctgccattgcctctttccttgtgcatgtctgagtggtgccagcctgatcagattctgttgcagttccccgtgcttgccacaatgtcggtcgcgtttcttatccaacgctgtttctgcttctggtggtttgtgctaaatgcattttcaatcccaagtggtacagagaagaaaaggattgtctttaaaaagtggctttgaatgtgtcgaaagcaaggttgcctgctgtgtgtttttgacaattgcctccccagaggagcctttgaaaacctcacttttcaagacgcttcaactcctattagaaagtgacttaaataaaattgctcttctgaccatcgcggctctggatgccaggctagtgattatttgtctaatctgagtctccagggctagaacttcacaccgtgtcttttcactaccctcccagaggaggtgagaggaggtgaatagacacttgtcagattcttctgcctggtatcactgtggggggatgcacacacactggagtataggcttgctaaagagagactgcattgctatttcaactagacacgtttacttttcccgcaaatgattactgagcacctatggtgtgcccggtaccatgttagggcaagagatctacctcatccttgcattgtaaacctgtagcatccgtggcaatgttttacaccactgccctcccagggttcctgcaagctgactccttttattttccttgtgcatgctgatgtgttcaaggtatttcaatgggctactgtgagactatctccccatcaggatctctcaaccttggcactaggaacatgttgggaaaagtaggtctctgttaagggaggaagaggggctttcctgtgcgtgataggatgcttggcagcatccctgtccagtagcaccacatctacctcagttgtgacaaccaaaaatgtctgcagacattgtcaaatgtctcctccctattttacatttaccaaagtgctctttatgtcctttacagttaaggaaacttaggaccaggaagaaacttgctcaagtcaaacagtgagttggcggtagagctttagctacaatttaagtcttgtcttcccaacccagtgtccatcttatggatccattcagtggtttgctcctaaatgcttaataaccaattatctgggataaacgaaagccaaacaaacttgctgggagcgtgggacaatttccatggtgtaaatacttccaccatggctggtttcaagctacttccatggcgtcactgaatgtgaagttgggaagggatctgtacagttggatctggtgagctggtgccagccagctcagaatgcccccaagtccatgtgtgctgctgatcacatattagtcttgctctcctctggaccttgttctgccaccccccagacacatgcccttatcactgtgatgtgctgtggggaaagcagtcacctggtaagagtttttgataacttctctggataaacataaagcagttagagtggagttatccccctcttctgttaaatgaaagtttcttttcacagtctttccattgaaggaattagaaaagtcatgggatacctctggtcttagagcagaaatgaagttccccagaagggggtcctggacagaatggtctcttgggcagggactaggtgctgttacttaccatcagatgtgtctactgtaagatgcttgggaggcatcaaagtggtgacagtggggggctgttggattttaccattctggaatataagagaaggggtgtggctggtgttttagtccagatagcagctgtgaccactgggagcctcattttccacacctgcaaaaggagaaatagtgatccccttcctagtgttggtgtaaagagtagatgaacctctgcctgagtctcagatgcctgctgcccacttggttgcttagtggatcggctggctgtcaacagtgtaagcttatcaagcctaaatacttagttggtcttgactttttcacctcgaccatgactcagtgtcatgtgctcctagtcattctatctgtggtccaacgttagcctgggaagcacctgggactgagggaagaaccctcagctagttattcagcgatccaggttctcctcctgcctttgatatcacctcattatataaccttgggaaacactttggtgtgactggaatgtggatactcccaggggaagggtaggagcatggtagggcatttggactttatcatgaaggtggtaggaaatacttgaagggttttaagcagggatgacacatcatcaaatgtgtgttttgaaaacttttttctgcagaggacagggccacagcccaagcaggatcaaaccagttaggagattgatgtaacagtcccgtcagaaagtgatgaggtagctgggtgcggtggctcatgcctgtaatcccagcaccgtgggaggctgagactggcagatagtttgagaccagcccttggcaacatggtgaaaccccttctctacagaaaaaaaaaaaaaaaaaaaaaaaaaaaaagccagggatagtgacctgcacttgtaatcccaactattcgaggtggacattgcagtgagccaagatcacgccactgaactccagcctgggtgacagaacgagaccctgtctcaaaaataaataaataaataaataaaagtcatgagacaactcataggcactaaatgctgagtggcacagacagaaagttctatgagagttcagcaaagggagaggtcagtatggattgtggtcttaggtgggtatcagagaacacttcagggaggaagtaaaactctgctgctggccttgaaggatggtagacagggtggggggtgaaagtctaggctgcaaggcagggcaagagggtacaaagctgcagtaaatcacatttgggcttaagctgggagttaacataaaggatggctctaattagtatgcagtcatttatggaagaacttgtaccctcagcttaggaatatggattttattagaagtggtggttctcacatggaaactgcattttcctgtagtcagtttctgtggggaatcttatcattatctattcttctatccactgctcccctcattggggtggagggtgtgcacccccctcctgcagccctgtgctattgggggaggcagaatccctttgcatcttggggacgaatgcaatgctgaatactgatcatatgacccctgctttgcctcacagcagggagcctaggaacaagagcagctgtgctattgtctggagcgcaattgccagtgtttgtctgccgaggccagggatgacccttgccagcatcatagataagccggctcccagctgtcatgggtgcattctcaatcattcctcatcctatggactctgactctctcccgcttcccaagaatgatggaagtttttcattttcccccgtgcctgctttgtgaaagtgtgtctggctcttcccacaaagatgaaggatgaccaacctcagagtatccaaataaaatgagatctgtactttctgtgaagtgttaggaaacagtttgctagaaaatagtatgagcgatatatcattgtccctgaggctcacatgaggaaattgaggctcatgagtgtgtaatgactcccctgaggtggcacagacaggaattggtaaggtggaaactagaaaccaggcaccctctgaacttcagcatattcctgttgggtttgaacaggagcattctatagaagaggcttcattgtcagggtagttttagcagaggtttgcctgataagaacatgactttctcaaatgtcagtgtgtctcctaggttaagctcttatagaaacactccgctgaagggcacttccaggcattgagagtcccaagactgttcagccactgtgcatgggacaagtcacttgccatgtggaactggaacccagatctcctgcttctcagcccagagtgctgtgcctcctagccggccttatggcataagtggtctctacggaacacccaacagaagccacctgacagtgtcccttgtagatagtgctgcaggctggggcactgggaagctttgaggtggtctgtgggactcagggggtgttcgccatgtgacaccatgtggcctttgggtacatgagggctgtaggtgttcacaggatataccagagcataccaggattgctggaaacttggacaacacatgactgtagccagactgactctagattgtcctcactgcagcgtggccatggtaccattgcttagtttctcactccaaggcagcgttggcctagaacctctgtaacataccgttacatctgatagtcaaggtcagcttggcctcactcatttagggcagtagtatttgctgaaattcaaatagatactaaatactgcactggtcactttaaatgctaggtatccctaatgaccctggaatgaagttgttattctcattttgcagataaggcaactaaggcttagctccaaagacctgagactgaggtttatgattgttgggcttgagtccccaggctctttctacagccccatcctccactaatgcttactaaagcatttgggatatcagcttaccatccagctacagatgaaatttagaagcatcagtatgtgtaaagtcctccacagcctgacaacagcctctttttccactcatctactcactgtatctctgccacctctttccttcctccccagctacgctgggctattcactgccctcagagaagctgaagtttacaattcaaccatcacctcttctcatttgtgcagggctctgggctagttacaatcatttgtaaagatgaatgagacatgacctctcctattaagtaactttccactcaatggtggagataaaacacgaacacaaatataatagctcatttggttttcaaagtagtccaaagaggcttgctggtatatatctccatatgatctgcatttaacaggtgttgtatctgaggatctgacagtagtgactgactaaaggtcacacagcccagccaaggccaagttaggggtagacccgggtcaagaccaagtcaaggcaacctcctggcttgcatcacctgggggtggtcaggctcagactccacagcccagattgttggtttttgtcttattgctgccttcctgatggagacaaggcaggctgtcagccgctgacatctcaaacctgcttaaggtgtgccccttacccctccctaatggtgatgctcctgtagttggagccgtggatgggaagaggggaggtaaaaatgaccctttgtctgacatccaattgtgctgtggcttggggttgtctgagaagaggaagctggtctccttgggtttctaatgtgtctcccacttcctcactcaaaggagacctggtgtaactgacattctaaaatgcagtctcaaggagaaggaacccaccccagcggttgtgttcaggcagtgcaatgtgaactcatcgaaaagcttggtggagtttcctgaatgctgcagccagtttggcaggtgttctcctgccctgaacatgggtgcgctcaccttaatggccattcaggtgttacaaagaccacagagagatgttaaactacagccttgggaaatgggactaatgtgagcccaggagtagagatctgggctcttgttctggttctgctaccatttgccacttgcaattgccttctctgccccatgactcataaacaccacctctgagggtggcctgggtcctctcctttgctgtagagtacagtggtcagggcccaggtgggggtccctcagatgtgagtccaaatgcgcacttcgttatctactcgccattaacccagagctcatcactcagcctctctgagtgactgtccagctccttatctgtaagatgtggataataggagcactgccatttccagcaagagtggggcgagggctggtagaacatccaggtgatgtctagaccatgcctggcacacagtcaatgctcagtgaataagggttggtatcttctgccccatcaccatcatcaccggcgtgttggcctctgactgtctaggactgcctgagccacggccactcccagttagtcactatctggtctctgggcttcttccatgctcggcttcccaccatgggaaggctgcatgctgggtggcatcagacaaatccttttcttttctaggtcttaagcatcccccagaataacataacgtatagtcataatcacagctgttgtgtgttgaatggtaacccgtaagaagataagtgcattccctaattcccacaacctgtgcacatggcctaatttgcaaaaaggtctatttaccaaaaaatcatcacttgcagaagcccctacacaaaacaggtaaaaaatatctctattccttttatcacaggatgagggcccagagccctgcacgtcagtgcctccaagagccctgccagtttctagggctgctaggagctggcaggcttctctggggcctctgaaaatccctggcctcgaggtcctatgatgctccatgattaaacatacgccagaaacggtctcttcagagaacagacaaatgccctctgctttctcattagctctgcactttacctgtattgatgggagagtttgttaagagtgatttcctggcttcaaaagaacagcagattcttccttcctcttgtcagagattcctaagaaggcagattcttagggaaagagtaaaacaaaaacgagctttaaacaccacctccttccccactaggcccagtcagggggaaagggaggatctctcaccaggttagagctgctcactcccacgcatgatgggtgcctgctggcagcagaaaaaggccaggccttgtcttagagatgcgcctgtcccctgaggaccccaggtctgtgtcctcccagtagactgcggtttctccagcaggtccagtagtggtggcagctgtattcccgtgctggtttcccgtctgcttgtctcaggctgtcctcaatgggacagccacagagtcctcactcttgagggacaggctgcttatcagaacagctgggtattagggttccggggcttccagggcacaaggaacccaccagtcttttaaaatacactgtttgaattagtgacaccctgccttctcaaaccataacatgactgctttataaccaagtggcatcagcctgtttatctataaggccaacaagctccgtgaattcagaagacaggcaggtgaacacagggagagtggattatttggaaagagtatttgtgtggattgggaagcaaggcattgcccagaagggtcctctaccaacacaactggacataaaaataaccagcctgtgggagtgtggattgtattcgggtgactgcatgttcttacatgcctaggacagtcctggtgtctgcctgttgtcccagcaatattattaaaagggccccctttcactctcagaggtatcctcgtttggatgataaaccattaaatcaccccaactgtatgactgtgtatataaaagtggttagcagcacttagtgtggatgtgtagcgtagggagtatgtggaagtaaacgcctgtgcccatgtgctctgacagcccagaagctggctgtgggttagcacagctgcacagttgtgggtaagtcacttaaccatttcacagcacacacggctttgaggtgagatcaggggcctcacagtccgataaatggtggttcagatcctttctcatagcctgctagctttgacctttatagaattacttagctttcctcaactgcaaattaagaataatcatatggacctctcagagttggtatcatttttacataatctatatacacatctagaatatttcctgacaaatcataacctgccaacaaatggtggctgttgttgttgttgttattattctagggctgtgactgtttttggctttagctcttcattgtagaaatggtgagagatgacccctgtctttcctggcttcccaggcatcatgaggctgaaacccagtggcatccccgaagcctggtgtcccgggcatgtgtgcactgctggtgctggggatgcagaaagggaaccgcctgcctgcccgcccagctgctccatctctctgggacataggaattggctttccaaggcatcatcccctccacccatctcaggccctgccttcatcccctccctggcccagccatgctgtataaacaccaacaccaggatgtcatttactggtgttgcctgacattggtcggctgctacccagagggcactaggtaccaaattcctaattctgcctgcacagcagctgtcagtctttcctgcctggagagtctcctatcttccttctctccttttgaaggaaggtgtcatctgttcctagtgtatttgctttattctctttctttccactatttggctttgcagaatttgagccagactgcttaagttcacaccttgactctatcactcaaaagctaaatcccatggacaagtgacttaatcattttgtgcctcagttacctcttctgtaaaaggggacaataataatgcctacctagtttggttgccatgaggtttcagggagtcactacatgtacagtgctaaacaaagcccaacacacagtaagtacttgatcagtgttagctatttttattatccaaacacctgccccttctggtttctcagtgttgctctgtgcttctggcattgagggactcagtctaagctctgctgctggtgaactgtgggcacaagcatgccccaccctgggctttgggtcccttgattgcccaccccggagggtggggacacagtctttggggccctttcggcctcccgtagtggatattgccttcccttcagttgttgtgccttgcttttctatttccagagccattcagaaggggaaggcagcagccgtttgaagctcttccctagccctcccctgaatggggtggggcgggacaggacatggggaaaggtcgctagactggaagacaggagatgcctatttcgggccctagttctgttttgagactctggataaggcacctcctgtctctgatttcggcttctccatttataaactggggtgattacccctcagctttgtaccgctctcaaaatgagcaaagatgaaaagatatggaaaagcatttcactggctgccaggtgctacagaagggcaaactcctgattgtgttgtgtggtgtgaagccccaccaggccaggcacagggcatagcactgtggaagtagcctgggccgcctgtggctgcttggatgggagcaaatgcatgctggtgttgctggtgatatgtgaggttgtgctgcctgtggagatgcgagatgagagttttcagtttctttccccccttgctctctgttctccctaatggacacttggccccggggtgactcacacagtaaaccatcagcaattgcttcagaaggcttggagtcctctcaaacatatgctgactttttgttgttctatgtttggtttggagtagtggggcagatccctgggaggccattagctgtgggacctggagtgagcccctgcccttggcgagcctttgtggttgcatctgtaaggtgggagaaggtggggtgagggtgagagctgagtgggggtccgtgttaactgaatgctagtccatggatcagagccaagttggtggcactaaaaccctctcagaagatttttaaccgtacaagtttcctgaccgctgctctggattgggtctgtattttttgtgagcttcttagatgcgtagccagtacagggggcccgctggagtaggggaaccagtatgtgatggcttacgggctctgcattctctaccccttggtgcccatcaggggtctatgaatagtattagcattagtagaagtggtattcggttattaagttattattagggtcatctctgtgtgtggttgttcaagttaccaggtgactgtcattctttacaatgtgcatttggagttggggaatttctgtaagcctcagtaagtaaatggagtcaacaaaatggacaggaagacaagcaggaggtgtcttagaatgatgatcaggaggaaacccggtgttccgcctgactgaccctcttggttttgtggtggaaaatagcagcatttgtgctgaacccagctgagtgaatccatcccagtcatgcacactgaaaatgggttcaattctgaggacatttgagaaaaaaaaaaaaagcagtgaggatgggatagctctccctgatacctgatcactttgagagcttttctcttgtttccagatccttttgtgacacgcctggcccctcagccacagtcaaaaggtgaggaacagggccttaccccagaatccttctttggaaattcaccaccttccatgtctacacctgaggtgtggaaaacatccctgtgccaggcggtgcttggtggtgggaagtggaatttgtggaccccaaccctgagtttggaggaagtaaacgtctttgccctgccctgttaccatcacaatccggtttcctaaaatgcagggcccagctccactaacgtccactcagaaatcactttctcatcaagccaaggacatttcagagttgctgtgttttctctatcatttccttccctcctcccccacttcacttcctgttttttcttcctctttctccacccccaccccatctctcctggcatgtcccttgttgtctgagaacaggaacaaagccttgagccagggagcgttgataattgtgacttcctgaggtgccctcttgctgctgcccctgctgctgagagccagaaccagcccagcctctgggggcctgggagccccagctgggagcctggcaggaagtcttggactttagacccctacttcccccacaagcccaccaccatcccccacccccatcagaaagagaatctaataaaaataatctttcatgcccttaccacaatttcagctttaaagaactgtctcatgcatttgagctgaaacattggaaaaaacagacaactctagtgtttgccctagtaacaaactatatagttcagtttagatagcaaaaagtagatttaggagacatgagtttatttctgcttctgcattgtatctctttttgactctgtagatcatcctagctcttgaaagattggtttcctacctctttggaaaaatggaattaatggtatctcactgggattttttgaggacaaattaataagaaagtatatttatacaattctcatggtatgcctgacagatatttgcttaataagtgaaagctcccctctattttctatgatttggttttctgcacaaaggagtggccattcaaatgcacaggagccaggaaaaaaaccctgcaataaatgatactcatggaaaaagagttcatgtctgttgctgtgtttctctgaaacgtggacagaaagagagagagagagagagacctgggcccacatatgcttctcactgaagagcagtgctcactccccactgtgtcactgtgttcatgggtcatggtattttataacaatatttttctaatgagaaacagggagaaccatcccaaccacatgcctgaggtgggctgttttactaatttagctcccaggggtgaaactacaaaaacagcaatctggaaaaagtgccacctccctttttcaaaatgtgttaaacaaaaaataaaaaataaaaagacttcccattcaaggtcaatgaccacttgtttgagaagtcagcctgaccatgtggctgcatttaaaaaatatgtcaaaggccagagagtcagagacatgttccaatgtggattcaactcccaaactgctgagtccctgagtgaggctgctttcttctgtgagcctcaatcccctaattataaaatgaaagaattagacaagactatctcttagatgtccttcaggcctgataatctgtgatcttgtgactctctgctctccttaaaaaatccattgtgactagtggagaataggaaatttcttcttacagtaacatgacttgcattccctttttagcagggtaccaccatcttaaggacagaaaagctacaggactctaggaggccaccgtcctgatttgggaagtccaacttactttggccagacagcagctaagctggttcatcccatcagcctggattggtgaaactgaatcacaggagatatttccaggtaagaaacaattgactttcgttataacgtgtagcacactgataaccatcattatactgcaggaagtatgtcgtatgcatgcttatgttatgaaagacatgaaactattaaggaaaaggttcaaggctctgggttctatagctgtattctgagtgggatctgtgctatcttgaggcttttgagggttaaggaatgaaagagggtagctgagaattacatgcaggggaagaacagagtcgagctgtagatctaggttcctttttccttgcagaatcatttagtgttcctttctgcccatgctagccaactagatttagacagtaggaggagaggtcctttggtagccaatctgagatggaatttagatcccatgtcagagaacggacttgcatcccacctgctacaacatctttagaaacaaattcagttcatgaagtttcatccaagagcgcttacagcagacaggctgcagctaaccattctcatcacccgctttcctgaccaccaacgcaatgtctctgtctgcttattgctcgtctctctcccctcctcccagtcacttatggatcctttccttcttatgtgcaaggaatgtggccacatctactagaatgtcttcattggagttgcacctgatgtaggctgacattcctcctagatgactaaagtttggtcaagcgttcagctgcctggattgtggtatattaacacatctctcttacgcaggcccagtgtaaggaatcatggtcaggagtcatgaaaaaaatgccaacacactgagatggccacacatcttcactcttgcactagtttttggtgttatcttctgctatcctgtcttgaagctctttttcagctagataccttgacttttctgaaaaactaaaaccagaagcatttcacgaagctaagcacaggacagaaggtaagaccaggtgatatctaaagcttgttttgcattcccaggattgtcttatcccagacttgtttcttatgccagactcttattctttggggaacatgtttatctcatgcctgcttcctttcttcctcttgtggtttctttctctagagtggtttctgagctatagcataattcagaggaaggagaacagttttgcgacttagacacacatgacttcagatctcagctgtgctctgtgttggctcagtgattttgcttaaatcaccattttaaatccccaagcttctgtttccccacctgtaaggtagggatagtacactccatgttataagctggtgttgaggattaagtgagatcacgcatgagcatggtttcttgttacaggagacctcagcaaataccagctcctttccctacctacccttttttagagctacttaaatatagctttgatcccatatctggatttcatttgagccttgtgcctaaaatctaggacaggccttgtccacaaatactgttaagccccaacgatttaaaaaggagagaaactgttaacagcctttttatttcagagctcttcatccatagaagccttttctcacccggactttagccagattgcctctccagcctggccattggaaggttttctctgccatacccaaagttagaactactactttcctagccctttgtcccatgaggtattagctgaaaactaattccctcccggtggctttttcccttcagactagcctacatccaagaccaagagtaagggtcaattgatttggggccggtatcctggcctggcactcagcaagacagtcagggtccaagcacatgctcattcagggctttcttccttgcctgttagcttttctaaggcagtcattcacccagtcatccattcagtcaatagatgttcatggaacatgaaccatgcagtgggtggctcgcactatcttggtgctagggatacaggacagaacaaaaccaagttcctgttctcaaggagcttgcattcaagtaggatcaagggatcatcaacaagtagcaaacatgtatgtattacatctggtagtattaggtgctatgaaaaaaataaagcagaaaaaaataaagctaagtcagagagctagagagttgagggaaatggacattactgttttatatacagtgccagggaacacctctggataaggcattatttgggcagcatctggagaaagtgagggagcaaggctagaaggaagagccagaactaaatctctgatcggggaatgcacttgggctttacccaatctcgagtgaccagtaggattggagcagaaggaatgaggagcctgtggaatgaagcgagggcagaaaggacttgggtgtttatgttctggctggcttttctggagattcttctacccttcctttctcttccccagagctctttcccaatgcagtgttagtcattcattcaaaaatctttactgggccctagctactgggactctgtagattaatgagtctgggccccattcttaggactccatggcctggtgctatcaaggtttcttggggaagttgcatcgataaagtaggttgatgtaaacagttgtcttaatttgatcatcatagagtcaatttgctagagtaggaattttccactggaacctcccacaggtcacttttacctgttctcttggaatttacttacatgatagactattggtctttctcgccttcagggtagaaggaggatcattcattcagcagatatatgagtgcctcttctatgtgagtgctgtaccaggcactggggataaatgaggactaggtcagcccctgcagttgagttgcttctggttttaccaggagacgcactaatggctagacaacacactttgatcagtgttgcattaggaatgggtgcttggggagctcagaggaggagtccctgacccagattgaggggtggaaccatggaagcttcttgggagcaggttgtctgcactcagtcctggagatgagatgtagccaggcaggaaccaagcaaggaggttaagatgcttcagggaagggtgttaggaatttccaggccgggagatggagacacataggcaaggactgtgcctcggggaatcctgtgcaccttcacctccctcctgagactgtggaatgtggagaggtgagtctgagagaccaagggactcacttagagagggaggtgagggtatgaatcagggatttttcagaccaagctaagtggtttgagtctgttttgaggacagcttagaactgctcacagtttttaagcaaaaatggatgagttattaggattggagttttaagaggcaaagagcctaattttatttgaaaccctggttccttaaaatgcttattttatacctctttcatatattattataagattatagtttccttggctgtaaaataagttcacacagatcaactgaatgagatggctgtgggtagcagatgcatacaatgtcccttcccaccattgatgctgcagtgaatgctaaacttgtcatttcatgcccagtcttagtacacagatagctgtgaaatggttagaacataagttttgtttctcttagaactggctggcaaaaacttaaactattctagtagaaatgatgggatttaggtcttgttacattttcttcccatcagaaaatgaatgagtaatatccattccttaaccctctctccactgaatactaaagtcagagtgttcttttagaaattacgcactcattaaacaggtaatatctgagtatctaccaatggtcacaccctgtgttgggccgtgaacatcaggacaaatcagacaaggtcagcacctcaaggagtttctaatcacgtgacaaagacaaaagcagccaacagagaagcagatggcagacaagaacccagacatgaacaaagtgatgtggatgcagaggatgaaatgtgttctctgcccaggaaagtcagggaaggctccaaaaggagccatatgatttgggcattgaaggatgagtaggagttgcgagctggaagagagatgctcaggtacagaactgcactctataaataagggccaacattcatttctctgtcatgggtgaggaggaaatagccagcctgctcatcatgctcagataatgcctcaactctgcttttcaaaaatccattagtagccacctcctcatcctcccactttgttcccaacagcgactaaaaagaagcaaattgactaatttgaattgatcttttctctgaccctatggaggtgttagtgagcagaatagggtaaggggaccaagaaaagaagtagaaaggaggaggaattcatcttcatcatccagaaacgctgatttaacagcatggattacaccatagctctctggtggtaaaatgcagctttacagagacctgagtctgcttcttctaagtgaaaactgtatttcccctgctaccttccctttggaactcttggggtggaactcttggggtagaatatgtatatgtgtgtgtgtatatatatatatatctatatatgcacacacacacagagggttttatgtacgtgtgtatgtacatatgcatgtacctacgtgtgtgtatatatgggtatatatgtgtgtatgtatatatgtgtacattatgtagaatttattctagaacctagctcagagcatggtgcagttgacctcctatcacccctgctggctgcaagatgaatggatgggctagacttaatctttcacctgcacacttccccagttgtgccaagatctctgcacttcgtggtactggatgttcacaagctccaggaggtagcctgggaccaggtacagaagatgagactgaagctcagggaggaaatggcttggccaaagcccacagctgtgaggacatcaggatccaaactcttgtctaattgtcccctctttcactgttcatgctgtgtatcaccctctccacaagcctatggggcttcaggcagaccaaggaggaaattatgaaactaagcattgtgtttggacttgaatctcacctggactccaaaatgcaggaccgggcaagcagtgaggtcagagcagcatatgtctagaagccctcggaaagctacatctttcccttcgggggtccgctcacatgctttcagggatggtgaactcaccaccttataaggaagctggttctacttctagagactgggcagccatccctccttacagaatcatctctaaacctaaccatgcctcagttctagttggcataaacatctcaacagcgaggggctttggggtgggtgctttgctctgatggagtcttttggagacaagggcagctctgtcacatgctctttaccaaaatgcatttagaatcacttgccctccttacagccagggctgtctggtttcttgttcttaggggccctatttgttcttcctaatgggctgggctggggacaagacatatgacctggggttcttctcttcttcctctaaggagaagtagacctcaacaagtgctttctctgaccccattctctccaaaaccctggctgcacccagggggagtgagcattcccttttatatcaggagaaattcaaaaggattgtttaaaaagagaaagaaagagaagatgctgggaagagggagtgaagagagaaaggggcaatgttctttttagaggcagcatcctcttgcccctgctcctgcactgaggcagtttcgagcacactctcatcctggcctgggctctgtagtcctccttgtcctcagaatccacaccaaagactacctcgccaaggaagcctgacttgatagcccagctggaaagagttcctttctccttcaaaaccccacagtgctgcccctctgtggcactttcttggtacaacaaggatgcagatttaaaaataaataaagagggagagagggagaaaaccagaaagtgaccatgatatctggggttaacttggattctaatccaaactgccactgagtcaccagttaaccttggtcagccctcctcccttcatcgtaactatgagggaattgggcttgatcatgcagcttcttccatctctgaacttgtctttaagatacccaactcccaaaagagtccttgagggctgttgaatcccacatggcctggcaggaccctggtgtggagtttgcacttaaatcaccaccaacaggaagccccgctggagggagataaattacctctcacctcttcgtagcaggcaaggcctctgtcagccctcaacagacaacagctgatctggctcacagagtgaaaggggctcagtgtgtaccctaccctcctggctgcaggccttaatgaggcagctaccagccctgtgctgagagctctggcacagctacaatgttcagttccttggtttcagttctctctccttcttccagccctgtctttgttcctgctttgggttggaatctaggagaaccggcttggcagggggttttggcctaggcctgatggcaagcctacctttctctgtttggagctgtaagctggcagcacactggccccaggatggagactgcactgacccggtagtaggcagagtccgggggttggggccaggtgcacactggcagaggagttatgaagaatcgtgactgctgaaaccaacttggccagtgtttcctctaaggaccccacttggtcatctgtgctcctcttaggacctcatttctcgtacctcagctctttcctgtctccagacccgaaggcttgactatgctgcaaatcaaggaagaaggggaacagccatctatcaactgtcttcagttgctgtaatgtgtaatacaaggagcctagaaacttgatgacatttgcagaggcacatgtagctagtttcaggacccccataaaacaaatactgtacatgtgagtgggcttcaggtaagatttgctttaattgtggtcttgatataatcctttgtagtgctgcagttaagagcccaggctctggagccagatgctcttgggcaagttttcaaacctcttcataggacagtttcctcatctctaaaatgagaagactaatagcaccaaccttgtaagggttctgggatcactacctgagttaatacaggcaagcatttggaaaagtgcctggggcactgtaaggactctgtgattgttagcaatttttattttgacttaaagcctcggttgaattttctattagaagcaagtgtctgccatacaacgtaggttcaaacacttgctgaccatttatgaagcatctcctggatgattgagttgcaaagccgaggccagcatcctgacggatatcaggatgaacacccggcagacatccctagtgtgtgacaccatctgtgcccttcagacaaccaaggaaaggtcttaggattccagaggcaggaaggtcctctgagcgaggagtcctctcagagggagtgagaggcctggagtcagtgtggaagcaggagcccgggggagccagggaaggctggagagttgacaaagggtgacgtagggaaggatgtcattgtgaatgggatagtgggaaaccagccaaggggagagaggaattgttcaacaaagagtttttggtgctagtgtgagcagtaagttctacttgaagccttttcagtgcaaatgcctgcaggccccaggagcagatccctccactttgcccagccctggagtcaggaggagggagatgtagaatgttcaagtggcgggttcccaccgtgaaggacagagcaggccaccactctacggccaagtgagcacaggcctcttctgtgtgcagcctgaggcaggctggcctcgtccccttgagggacctgacaaagactggcttgttctcccccgacatcaggcctcaccctcaggattgctctgtccttctggggcaggatctcacacagcgataatcgagcgaaacagaagagaagaatggagtgaagatggtcccaggcgtcgccatgccaaccctgggcctgtggagggcgcctgccctgtgtcctgtctgcacctcccagtttgcaccagggatatcccagtggtagagctgctggtatcggttcagaaaggccagctgcctcgtcactgagccaccgaatgttacagtaacgttcagtaatagctgcaataggtaggttgactgttctctgcttttgcattgcatttagcgatctagattttctattataacagatatttttgtggagagttgaaccttggaaatttcataaatcttatttttggagggatctgagggatcattgggtctacctctgtgtgatctcatttgcaggtgaagaaacaggctgggagagtggaggcagtgttggttgtagaaagagtgaagacttcatagccatctagtccagctcaaggactgagatattgtatgtgaagcacttagtacaaagcccagcctgcagtgggggctcagtgggtcctatccctggttacaatgtaaactttcatttgtgcaagtggaactaatcaaggggcccacttgtaaaaccaaatgcatactaaaccagtaggagaggaactccggatttcgggaccaatcctaaaacgaccactggttacttgggggaggcagaagagaaggggatatgacactgggacttcagatctttagtcaagtgcagtggttctcaaacttgaggacactgaggattcgattaaaacatagacttgcattcagcagttctgaggtggggcttgagagactgcatttgtaataagctcccaggtgggtgccagtctccagaccatgctcagagcagtaagagcctagaaaactcaaagaaaaaacaataagccattttgtatttcatggttagaagcaatttatgcagaattcattgccagagctcctttatggacaagaactactggctcctgtttggagcctgatccagtccatctaatggagtcacacagaagggaatggtcttcatgagttccagaatcttgctgtgccgcagtttccttatctaaaggcactactctgcagagagattttgaagatgagtaagagccagcaaagagcttggcatccagtaggcattcaagaaaaggcagctgtggagagggatgtggcaccttgccaaggccatacagctgctacgtggcaggtgaccgggtgtctctacgctccgtctcagtgtattttccatcttccactgagtaccagaggacctgagattattttgtgtagctgagctgggttgtcagatgatatgagctggggagcaactcagacctcatgttggaatcacaatttgctgtcttcaagtggaatgaagaaatagcccaaacagtgcttgatctgtctgggaggcttgcaggctctccagagggtgaaaggcaaagcgttcgaatgtagaggactgtgtggccacagacagcagcctgggaaccccgacgacaggggaaagtttaaatcaggatagagcatcgctgagtcatcaggagccaggctgggcttacacagaaattcagagataaactttgtgcgtttgtttgtttggtttaattgtggtcttggcttatcaatctaaacagggaagttccatgaggactttgctgccttctcttgtggattgcagatttcctgcagggacatcctccatgggagcaacttgtacctttgtccatctcccatctgtccataaaagcaggctcgggggtacagatcatgaattgagggtcttcaactatgtgcatttccatttccagagtattttctgactcaaaatataattttaagtgggggttttgtttaaatgagttatagaaactcattctgataagcttgtggtaggattccaacctttctttttacccttaacttgagtgaagttgattcagccacaacacagatgttttcctcagtggaaaacgtgacttaagaaactagttgaaggggctggagaggataattactaagccaaatggctaagtctattcacgtttccttctcaaatgtcatagccccgttttctggcaaagtggtcaagacagatgcttttgaaatgaccttgaagcagcaattgagttactacattaagtaagcgttggctactacaactgtgagtttaaacactttttacaaatgagtggaatcacgtttagaaaatattcaggatgttgaacttgatacttctgctttgtccttttttcacaaatttctgcatttgtgttcggtacctacctgaccaggtctggtatttttaatgtgagatgataatgccccttagtggataaggtacttaactgcaagctcttgcatttgcccagagaaaagctctccaatttagcagaaatatacaatatagtaactcttcaaactaacctactggagggtaattgtgagaattaaatgagggcatttgcatgtagcgcttagcatagcatcgagtgcagggctgacactcagcgaatggctgctgttagtgtagttatcggatcatgagaatttgatttagatgaaggccttttgaaagcaggggaatgagtgtccttgggatttcagtgtcagggtcctctgtgtctgctcaggtatgcattatgaaaagggactgaagagaatcatgtcctcccctgggacagcactacccgctggctctcctgcccagaggtggaggcagtaaatacctgaaaatgcactcctgaaaatgcatggaagtctcccagccttcagcattcttcgaaattccttcagctggaattttgacttaaaggagtgtactagttcattctcacgctgctagaaagacatacccaagactgggtaatttacaaaggaaagaggtttaattgactcacagttccacatggctgtggaggcctcacagtcaaggaggaagacgaatgaggagcaaagtcacatcttacacggtagcaggcaagaaagcttgtgcgggggaactcccatttataaaaccatcagatctcatgagacacattcactaccatgagaacagtatgggggggaagtgccaccatgattcaattacctcccaccaggtccctcccacgacatgtcgggattatgggacctacaattccagatgagattttgggtggggacagagtcagaccatatcaagaagttccataaaatgagcatccacctccgcttggtggggagacattgctattttgcagcatctatccttgaagttggacttctcacgcagctcagcctcctgcagctgattggctgcttcagaggccagagcagagatggttctgcaggcttgtcatcatgaaagtaagtctctggccatcacatcctagcagtgggtggcaggctcttctcaaatcctgctgtcttttttagaagttaatttgtgcatcattgaggacatatttcacttttcttgttgactcaaattatctttcttttaactttcaagcatagcatgagatctttagctatatctttattaaaatgagtgtcaccatggtggaaccatttttattcctcccctcccttcatcccaccctcttttttcctccttttctctttcttccttatttccttccttccttccttcttcctatcctctcacccttttcccccctcccatccacatgccctcctttccttccctctttctttctaagtagttgcctggaaggacctcaggctggaagaacttggattctgattgtggccttcacactatcattcttcactcattctttcatgcattcagccacacacattccctgggtggcttgctgtggattcaatcacaagtaagttccagttcccatccagggggtcttcacctcctaggaggagagacaggcaggtaagcaggagtgaccaggaatgtggaaatgtggtgggagagaggacacagggggctgtggcacaaggtgcagagggcaaggagtcccccctgcaggactgggacaggcatcgtggcctggcaggaaactactttcagagcaggcttaagagccacccaggaaatctggtcccactacttcaacataaccagaagactgggagctggcaatggcttggctttcacagatcttaaagccaaccctgtgacagctgccactccagagacccctcatgtccaacctccaccaccacccccccacctccgcccctccgcccagtacgtgtgatctcagcagatcccaaagtgaaggacgttgggctcctttcttcacacctcacaggcgtcttggcagtgggatgttcactgggagtttctccctctcctccacctcgagctacagcccctttctgcaggaaaccctcccagactattctagtccagatgaggcacctcctcttttagactcctttccccaaacactttgcctttacccagatcacagtcctcactagagtcttcctccccattatagttgtctttgaatgcagattctcatccttactggtccttactgcaagagccatgttttatttagccctattctctaaaaagagcaatgctcatgtatttatttctttgactggttaccagatttatttatttattttttgagatggcgtctctctctgtcaccaggctggagtgcagtggtgcaatctcggctcactgcaacctccacctcctgggttcaggcaattctcctgcctcagcctcccaagtagctgggactacaggcacatgccaccacacccagctatttttttttttttgtatttttagtagagacagggtttcaccatgttgtgaaggatggtcttgatctcttaaccttgtgatctgcccgcctcagcctcccaaagtgctgggattacaggcgtgagccacggcccccggcctagtcaccagatttcaatgctgtattaagaactgtgctagatacaggggatggattgatgattaacacctgtcctcaagaagttcaacagataggtgtaaatattacatttttgatagaaatatatgcaagatatacaggatatatatatatatatatatatatatatatatatatatatatatatatatatgttgggactaaaagaagtcaatcctatttttgaggcaagtgccaaggatgatgaggggtgatggatagagggaggatcagcagaattgaataaaatgggaagtgaaatgtgggtagttaggtaactaagcagagcctatacagttttgccaactctacagaaattttggttatgcttgtaatttctaggaactttacagaagtttatcatgtgttccaactacatggggcagtacacataggctgccgaagccttgggatttttgagtctcaactttatcatctgtacctgaacaggactgggccactgggctggatcagggacacttctccctgttccagcattctaggattttatacaatgagaatgtcaacaattcacaaaaatgtattcaggcaacctaatgccaaaccatgtgctaataagttaattagaaatgagacacaatttgctatgagtttccacagccctcttgccctgaccagaggccacaggccatgtcttaagccattttctgtttcccaaaaacatctaataatagtgcaggagtattcgacaaaataacatagtggcttagactgtgagttttctggtatgatgggctgtgtttaaattccagttctgctggtgattaactgagttaccctaggcaagttactcacttgcttcagtgttctcgtttctaaaagggagatggtagtagcacagaatcttgagtttgcttttggcattaaagatgacactatatgtatttagcacaatgcctagcacagaatatatgcacagtctgtggaagttattattattattcatcttactaagtaagcagtaagtactcaattgcattttttgttggctgtaaatcagtacatattggcaatatgctctgtctgccaaaatccctgagtaccatcttgggttacctcagtagaggtttagtgtccagatggaagcgagatgcagtccttctgggcagaccacactcagaggcctggaaaccgttctggatactacacagtagtagattctctgaccagtaagagtgtgtgaataaaatatcaggttgatctgagaacctcttttcccctgtaatatggaggaagaagcatacgttttgttttaggaggagaagtgacaggggagtcatggaagatgtccttatttattccacatatatgtatggcattccttctatgtgtcaggccctattctaggagttgagggcacataaataaatgatgatatatacttaaaagaaaagcagagttactggggagtgggagtaaaatagtattttggacaaaactgttaggttgaactccactgaaaaataaatcccgaatgaatatacaaagaaaatctatgcagattgtggaaaaacattccaggcagaaggactagcaagtgcaagggtcccgtggtagaaacatgtggtctccagctagaagctgaggtctgaggaggggtgagatgacatgcccagggtcttctggctaatccatgttacaattgagatgttgatatttaatgtcagacttttcagacaaaaaagctcatgcctattgtactgtactctttagacaagggagggagagaagagcctggggccccaggggtcccccttgtgtgctttatccccggtatccctggcccgcagttccagagatgaccagcagagggtaccatgcaccgggtttccgcagccactgcctgaagccatgttgaatgagcaaatgtctgcagccgcctctgtgagatctaaatgtctccttggcaggaaatccgcgaggagcacggcggggttgtgcaaacagccttacaatgtccgcttgtgtgtgtgcactcgccttcgcctgcatcgcccacaatgctctgtgtttttttttggataatggggctctgtggacccatgtgccttgtcatgcaaagggagtgacctgcgtttgtcataaatgggctcttgtatgattaatagccatgtgaatgatcccatcgcagcagcagttcaggacccagcttcacctcttcactgacgtggtggtctgagtcggctttcttctccagctccaaagcaacagtgcaggatttattgctaaaagggcaatgacttgtttgcgctgtggttgcaatttttgaaatgcaaggcagggggcgcagatacttatttgttaggacctactgcatgccagatgctacactaagaacttctacctgcattatcttacttacttagtaacaatactaaaaagggaatattttgatttgcattttactaacaagggaaactcagattcaaaagagtccaatgactctcccaacgtctccaaagctcatgctgtttccatgaaatgattccctttcctttttagagtagcttagtccgtggtccacactacaaaacgccgtcctcattccacttggccatctataaactgaaatttgcgatcttaaaatagatgagggattccctcgtttctgggcttccgtgtatttattttacctcctgaaagtgtatcagtctgcatgtgtgcatttttctgagaaagccagttttcattagattttcaaagtagtctctggtcctaaaacaaaagggctaatcacccaaaagtgtttatatttggggaaatgcttatttttctcagacccgtttctctcaccaatgactgttttctctgctcagtctgtgtgggtgatgtctttgttgttgttgctgggtagtgactacttatccagtccttcccatccatctcagtggccataaatgaataatgcgatgtgtgggaccctgcttggtggttgggcggggaggagtgaggaggagtggttgaaatggctaaaacactgacagccagtcagagatagcccctgcaagaatccacaacagcaaaggtgcttacttatgcctggggtttggggaggaggttactgggagaaacgataggccgtctttaggcgttcaaggcaaaaggaacagtatgagcaagaaaacagaggcaaggaccgggcactctggctcacacctgtaatcccagcactttgggaggcctaggcaggtggattacttgaggccaagagtgcaagaccagcctgaccaagatggtgaaaccctgtctctactaaaaatacgaaaattagccaggtgtggtggcacacacctgtaatcccacctgcttgggaggctaaggcaggagaatcgcttgaacccgggaacctgggaggcagaggttgcagtgagccaagatagtgccattgcactccagcctagatgacagagcagactccatctaaaaaaaagaaaaaaggcagaagcaaggaggcaggagcccttccactgtcatattctggtgtggcttatgtacagagtgatcagagtagcttcagcagaggggcggaatcttgaaagagagctctaagccaggcttatagccttgcataccaagtaaaaaatttacccagctttatttgacagccagcttagcaggcgtttatgctaaccatggctaacttcgtcgactcagctaactctgtattctatttgctccctggattctgtctcaggaagtagcaccccccacccgcccctccctgcctgacaggcccacctcccaccactctgcagactctcacctcatccacctttcctgtcccagccttaggttgaccgtctgcacagcttgctcgggtaccaagccagggcttttattttaacatgttagttttgtttgcaatgatgagtacgttgaaacaagggcaattgctcctttcagaagctggaaacaaaggcagagccgcacctgtctctgagatttcaagtgaagtttcaacactttggacattcttgatgcttgagatttcacggagcatgctaatctctcttggcctcatattcttcaggttttttgtatgtgatggcttttattggatttttttttgtttcggtaccaacataattttttatatccccctgcacttcccaaaataaatttgacctgggagcaaatttcctttgctcctttgctttgacatgtcacatccaaagcctcctttggtacccagatgagctccagtttaagaaaactcaacatctgaaaaccttcttagatgtcgagtcatcccaaggtcctggggccatcgaattctgcagggccttttgcttcccagaaggaccattttcatcaggactcgcctcctggtcccttgacctgataggttgtattttaccacctgccagagaactatggaggcagataaacttcaagaacaaatgtgtgacacagttgcctgtggaatgaaagctgggcagggaaaaggagaaggcctctttttcattttgtttttttttttttttagttatattgtaagacaacaggaatggaagagatttaattccccagaattagttgtatatgtgacattccctgtaacatgttcagagactggtgaatgatcccaggggtctcaagtatccaatataagagtgggaggaggagagagagagactggagagagagaaaggaggaggacacccaagagaagggcatcgggaagaggaatggatctaagggagacatggagagagtttggtgggagagtggatcaaggggtacagcaggtagagaaatctcaggtggtgcccagggctctggttatgacactgggaggataataatgctttttgttgggtgagggaagaggagaagattttggaaagagtggaaagtgaggtttctatggccttccccgaatggctatgcttgtgggacattcacttggattgatgggcctggagctggggacagaagtctaatatagagccagaggttgagagtcatctgcctatgggtggaaattggagtcagaagggtcacaccagggagaatgagaaaaggctgaagaaagaacatggagaccaagacttaaaggccagatggacaaagtagaaacttgaggaggaacttccagagaggtgagagatgaggaaggagatgggtcccaagtatctcagcaaggagaagttgctcagcggtgcccatgacaagccttcacctacagctctgctctcagagggttagagggtcttggctgttgtttatttaaatacttgagaatgaattctgaagaaaggaggtttgtaatccaaaaaactgacagcctgtttaagcgaattcactatcagaacagcccaaatttgagataacttctaggtgttcccttttactttctagactggagttgaaaccaaccaagagaggaagagcaacttgcccaacatgacactaagtgaatggtgtctccaagatgagtgcttgggtctctggggccccttgccctgcatggggtacctttccatttgaaattaggcagaacgggcctgggtaggctgagagtgtccacctgcctaggtaagaagcaggtgtctcaagcagtttcctcataagcatgttcttgatttcccaagagaaaggggacagattcactagtgacttcccagcggtggcctgggccggagctgagcccagtttgattgcttccatgtcactagcatttgaaagtgggggacacattgactttcattccctaaaaaagaatctaattttgccctcatttcttgggtactttttgctgctgtactattgatgtttatggaaaaattagctatgatgaggtaatagtctattttagaaaactgaactcagatattgaaagaactattttaaacctgcacttaattgttcaattccataatggtttcttggtttttttttttagaattcccgtgaattgccttacaactggactctagcagcttgtattccatggggaatgccaagcccttttgagggacaccatggtattaatgatcgatgagaatattcaaggcattttctcatttgagtgccattacttgtagtgttaaaacgttttgaaaacacactttagccattaactcatttttattgtcagatgaaagtgcttaatagactcactccacttcagttttcttccttcatctcggaatgaaatcgtctgttggattcttggcaatacatttgacaatggaacagaaaacctcatgacttcattgcaaaaaatggcagatggagcagggatgtgcaagcccagccccgccatctaaaatggctaacctggcttagcaaatacaggctcccagaatgtatcaactgagctacttcattccagtggtgcatatttttccccagaaaaacagctgcttatatcatttaagaaatgtacctttagatgagaagtattttttaacaccacctattgatatattgtaagctgatgattaaatggaagtgggtagtttgttttgcttgtaattcaaaacagtcagatggtgtacatgttgtaaacggggttctgtggtgaccaggagaaagcgtgtctgagtcatctgaatactagacatgtcagggctgggccccttcctcctgggacacccactggatgccagacgatggctgggaggagccagaagtgctgctggctttgcagagcactgtgggacatctgcaagcctttgatgtcactgacaacagtggccgccctggctgcccatcaggatttctccaactctgaaccttgctgataagcttgaaaggtagattgtcttaattgccctcctaaaatcacatccagtctccagaaacattcctaaagccaaaactggactgttttcctctactctgttttcttctaccctgctggggaaatcttggggccccatagtagctagaaggtcagacttaacgataaaacaaagcgaggtagcaggtgcagatgaaggcgctggcctgacgacgtgagaggccaggtcacgcttgtagctctgctcccagccccacacaaggcatagcccaggtgcgtgttcctagacttcaggatttcaaaaaccagtaacatttccaaataaacctggcatatttaggatataattacaacatcattttccaacataaataaaaaccgtgtaacatagaagtgtttgaataactttctgaaaggctcatgacgtaggctttgtttttctcattttgccttggagggcttgggaaccactagtcagaacaatcctaaggatttatttttcagtgcttactacatgctagtcctgtccttaagtgctgggaatacaaggtggtgtaaaagcagccctgccctagaagacagggagatacaggagaaagcgtatgtaattatggtttgctgcgataggcactgttgcatggcccacaagacatgttaggtgagcagagacgaggagctcactcagaagagtggcttttgtttttactggtgtagaatagagggggagggagggctcagggggtccttccaagggtcctgatcttcaccctcctacttcaaaggaagtgtgggggaagcaattgccaagagctggtgcttagatgtcagatagaaggggattccagtgaccctgatctgtcactggtgagatgcagtaagtttctaagtctttaagattatttatctctgaaactgggataatagcagtaactatttcatatggttgttgtaaaaattaaaatatggcaatacataaagcaccctcctcactctggcctgcagatcattaagaatgttaagcagacagagcagcatgtgcaagggccctgaggcagtcaagagcagagccactctagggatgggatgtgcagggcaaggctggagtggagggggcggggtccaggcgttctgtgcccagtgcattcatttgaatgcattctgtccgacaggcactggggagccacagaagcatgttaagcaaggaagtagtatctcagatttgtgattaggaaaatggctctgccggcagcatggaaatgagtagaagggagacaagactggtgtcaggaagatcaagttggagactatttgcaggatactggcaagctctgccaagggtatgaatcaggaaaatcaaattgagaaggaagggaagtgtgcaaaaaaaaaaattattctggaccaccagcgagggtgtccttattagggagcaaagagcattctgagttcatcatgtcttagaaaatgaacttgatgccccatttactctttgtattaatggagagagcatgagattgagagccacaacatctctcttctagtcccttctttgaccctaatgtgctgtggattcttggacccattctttttttgtaaaatgagagctttaaaaagatgaccccagttctaatatggagtgtattcagattaaatttggggatgtagggggcctgtatattatgaagtccaggacccatctggaggaccttgggaaggacacttactatacctggtcatggagttcttatacccgtaaaatgggtccaatgataacttttctccctttgacatatgttcatactgaagataaatgcaatcagacacatctttgacaaagatgtgaaattatataaatatatgttattggtgtattcatggtcagtctgtagtttaaatgctatgttgccaaaaaaaaaattggatgagtcaggacttccttattcccaaaatgttgttataggcaatctgagtcttcgatttcttcaagtctttgcaccagagaggctaaagattatagattctggaaggtattgggtcattcaaaatgataagaaaatctatcccttctgatagaggtcttcttatctgttagagatgagtattattgtcttagattttaaaaaaatgttagaaaataaaccctggtagggctgctgttgtattgatttgttttctcaccttctgttcattattgataaaaagtagcattggcttaggaattctcctttcaaatagtcataaccaaagaaagaaatctcctaggagcttgtgatctactcatgaaggttgagcattgaaattttggtatacacaggcagaggtcatcattcacactgccctgttccctgggcctgcttcctttgatatgtcttatttatagaaaacaaatgaatttctccataaaccacagtcacttctttttaaaataaaccctgcttgatttcatttggttttatactctgggagtgcagctaatgctatcaacttatttttcttctaaacaaaaatagagttgcaaatagtgaaaaacagtgtctgcatatatgaattctctctttttttttttttttgaaactggaaatgtgactagagaattatttcttaaagagagtcatggttttccactgaatagccttaaagccaactctcatagaagtggttttgaactgagagccaagaaagcggtcatagaaaataccatgagtacatccaaaattgtcaccccttaaagatgagtgcctcccttggcaagggcgtgcaggcaggctttagaggcattgctaccactcctaaaatgactagagaaacacccatattctagactatttgggggaaaaaaattgaataacctatttcaaaatactagcacagtaaatgaatcttgaggaagaaattctctgtttttggaggattgaggggtcacccaatgtgtattctgtgttcccttcacactcagaatcccccccaaccccctcagctggagggcttctctcagccaacccggattcccagtattcttcacgttgggtggcagcttgcttcttctatcgagcaaactcttccagaagacttcaccccacataattttctcttttccttcatttcctaaagaaacacctcccttcctgtacatgctattgagtagcactagtgtagagccaacccctttggaatctaatggaagctatgggctgtctccccagaaaaaatgagcgtgttcattcaacaatacagcaccctacacataccttcagctgaccacactctctgaagtccccaggcaggggcctcctagggatgtggagccccaggacttctactgtgcagaaaagagcatagtcttcagattcacagagtttcaatgtcaaatgtgactctatcttttattttcttgtagtatttgaaaaattgtttagccattcgaacctcctttttatccccccaatcaatgtgatgataattatagctacctgatgtttgctgtaaggtttgaatgagataaagtgtgtgaaagcttcaagtatagtgccacacacacagtgggcactcaataaaatgctgatgttccagtttctctcataaattatagtagtaataactataattactctgttacttaatatgtagcggggacatactattattttcacattcaattaatatatttgagtacttatgatttatcaggaatgtgatacgtgcttctagatagattaaattgtttaatttaactagtgctgtttccctaaatagaatgtgcatcacctgaatgcggaagccatgtcttctctcagtgcataccccacctgtaagtgccctggggattgagtaattctctcagagtaattgttaaaggtagcattttcattagaaaaccaaaggaggaagaagaaacttgccacccaaactgttatcagattgccttttcgtgggataggcattgctttttccttttattttgctgtcaccaagagagtcagtgttgaggaagataaagcagatctcctaggactggagtgggcagccaccccaagtccccgacttcagattgctagaaaatctacgtgttaactttttatgctttggcatttcatttcttttcagtagaagtatttatgaaccactttggttgggttttctttattagacatttgttttccttagactttgtgctatatgacatggggtacacatagacacaactgtttggttaaaaagtaaaatctggccaggcacgatggctcacgcctgtaatcccagcactttgggagaccgaggcgggtggatcacctgaggtcaggagttcgagactatcctggccaacatggtgaaacccgtctctactcaaaatacaaaaattagctgggtgtggtggcgggtgcctgtaatcccagcttcttgggaaactaaggcaggagaattgattgaacacgggaggcagaggttgcagtgagctgagattgcgctactgcactccagcctgggcaacagaatgagactctgtctcaaaaaaaaataaagttggaggaggagccaagatggccgaataggaacagctccggtctacagctcccagcgtgagtgacgcagaagacgggtgatttctgcatttccatctgaggtaccgggttcatctcactagggagtgccagacagtgggcgcaggccagtgtgtgtgcgcaccgtgcgcgagccgaagcagggcgaggcattgcctcacctgggaagcgcaaggggtcagggagttccctttccgagtcaaagaaaggggtgacggacgcacctggaaaaccgggtcactcccacccgaatattgcgcttttcagaccggcttaagaaacggcgcaccacgagactatatcccacacctggctcagagggtcctacgcccacggaatctcgctgattgctagcacagcagtctgagatcaaactgcaaggcggcaacgaggctgggggaggggcgcccgccattgcccaggcttgcttaggtaaacaaagcagccgggaagctcgaactgggtggagcccaccacagctcaaggaggcctgcctgcctctgtaggctccacctctgggggcagggcacagacaaacaaaaagacagcagtaacctctgcagacttaagtgtccctgtctgacagctttgaagagagcagtggttctcccagcacgcagctggagatctgagaacgggcagactgcctcctcaagtgggtccctgacccctgacccccgagcagcctaactgggaggcaccccccagcaggggcacactgacacctcacacggcagggtattccaacagacctgcagctgagggtcctgtctgttagaaggaaaactaacaaccagaaaggacatctacactgaaaacccatctgtacatcaccatcatcaaagaccaaaagtagatataaccacaaagatggggaaaaaacagaacagaaaaactggaaactctaaaacgcagagcacctctcctcctccaaaggaacgcagttcctcaccagcaacagaacaaagctggatggagaatgattttgacgagctgagagaagaaggcttcagacaatcaaattactctgagctacgggaggacattcaaaccaaaggcaaagaagttgaaaactttgaaaaaaatttagaagaatgtataactagaataaccaatacagagaagtgcttaaaggagctgatggagctgaaaaccaaggctcgagaactacgtgaagaatgcagaagcctcaggagccgatgcgatcaactggaagaaagggtatcagcaatggaagatgaaatgaatgaaatgaagcgagaagggaagtttagagaaaaaagaataaaaagaaatgagcaaagcctccaagaaatatgggactatatgaaaagaccaaatctacgtctgattggtgtacctgaaagtgatgtggagaatggaaccaagttggaaaacactctgcaggatattatccaggagaacttccccaatctagcaaggcaggccaacgtccagattcaggaaatacagagaacgccacaaagatactcctcgagaagagcaactccaagacacataattgtcagattcaccaaagttgaaatgaaggaaaaaatgttaagggcagccagagagaaaggtcgggttaccctcaaaggaaagcccatcagactaacagcggatctctcggcagaaaccctacaagccagaagagagtgggggccaatattcaacattcttaaagaaaagaattttcaacccagaatttcatatccagccaaactaagcttcataagtgaaggagaaataaaatactttatagacaagcaaatgctgagagattttgtcaccaccaggcctgccctaaaagagctcctgaaggaagcgctaaacatggaaaggaacaaccggtaccagccgctgcaaaatcatgccaaaatgtaaagaccatcgagactaggaagaaactgcatcaactaatgagcaaaatcaccagctaacatcataatgacaggatcaaattcacacataacaatattaactttaaatataaatggactaaattctgcaattaaaagacacagactggcaaattggataaagagtcaagacccatcagtgtgctgtattcaggaaacccatctcacgtgcagagacacacataggctcaaaataaaaggatggaggaagatctaccaagcaaatggaaaacaaaaaaaggcaggggttgcaatcctagtctctgataaaacagactttaaaccaacaaagatcaaaagagacaaagaaggccattacataatggtaaagggatcaattcaacaagaggagctaactatcctaaatatttatgcacccaatacaggagcacccagattcataaagcaagtcctcagtgacctacaaagagacttagactcccacacattaataatgggagactttaacaccccactgtcaacattagacagatcaacgagacagaaagtcaacaaggatacccaggaattgaactcagctctgcaccaagcagacctaatagacatctacagaactctcaaccccaaatcaacagaatatacatttttttcagcaccacaccacacctattccaaaattgaccacacagttggaagtaaagctctcctcagcaaatgtaaaagaacagaaattataacaaactatctctcagaccacagtgcaatcaaactagaactcaggattaagaatctcactcaaagccgctcaactacatggaaactgaacaacctgctcctgaatgactactgggtacataacgaaatgaaggcagaaataaagatgttctttgaaaccaacgagaacaaagacaccacataccagaatctctgggacgcattcaaagcagtgtgtagagggaaatttatagcactaaatgcctacaagagaaagcaggaaagatccaaaattgacaccctaacatcacaattaaaagaactagaaaagcaagagcaaacacattcaaaagctagcagaaggcaagaaataactaaaatcagagcagaactgaaggaaatagagacacaaaaaacccttcaaaaaatcaatgaatccaggagctggttttttgaaaggatcaacaaaattgatagaccgctagcaagactaataaagaaaaaaagagagaagaatcaaatagacacaataaaaaatgataaaggggatatcaccaccgatcccacagaaatacagactaccatcagagaatactacaaacacctctacgcaaataaactagaaaatctagaagaaatggatacattcctcgacacatacactctcccaagactaaaccaggaagaagttgaatctctgaatagaccaataacaggctctgaaattgtggcaataatcaatagtttaccaaccaaaaagagtccaggaccagatggattcacagccgaattctaccagaggtacaaggaggaactggtaccattccttctgaaactattccaatcaatagaaaaagagggaatcctccctaactcattttatgaggccagcatcattctgacaccaaagccgggcagagacacaaccaaaaaagagaattttagaccaatatccttgatgaacattgatgcaaaaatcctcaataaaatactggcaaaccgaatccagcagcacatcaaaaagcttatccaccatgatcaagtgggcttcatccctgggatgcaaggctggttcaatatacgcaaatcaataaatgtaatccagcatataaacagagccaaagacaaaaaccacatgattatctcaatagatgcannnnnnnnnnnnnnnnnnnnnnnnnnnnnnnnnnnnnnnnnnnnnnnnnnnnnnnnnnnnnnnnnnnnnnnnnnnnnnnnnnnnnnnnnnnnnnnnnnnnnnnnnnnnnnnnnnnnnnnnnnnnnnnnnnnnnnnnnnnnnnnnnnnnnnnnnnnnnnnnnnnnnnnnnnnnnnnnnnnnnnnnnnnnnnnnnnnnnnnnnnnnnnnnnnnnnnnnnnnnnnnnnnnnnnnnnnnnnnnnnnnnnnnnnnnnnnnnnnnnnnnnnnnnnnnnnnnnnnnnnnnnnnnnnnnnnnnnnnnnnnnnnnnnnnnnnnnnnnnnnnnnnnnnnnnnnnnnnnnnnnnnnnnnnnnnnnnnnnnnnnnnnnnnnnnnnnnnnnnnnnnnnnnnnnnnnnnnnnnnnnnnnnnnnnnnnnnnnnnnnnnnnnnnnnnnnnnnnnnnnnnnnnnnnnnnnnnnnnnnnnnnnnnnnnnnnnnnnnnnnnnnnnnnnnnnnnnnnnnnnnnnnnnnnnnnnnnnnnnnnnnnnnnnnnnnnnnnnnnnnnnnnnnnnnnnnnnnnnnnnnnnnnnnnnnnnnnnnnnnnnnnnnnnnnnnnnnnnnnnnnnnnnnnnnnnnnnnnnnnnnnnnnnnnnnnnnnnnnnnnnnnnnnnnnnnnnnnnnnnnnnnnnnnnnnnnnnnnnnnnnnnnnnnnnnnnnnnnnnnnnnnnnnnnnnnnnnnnnnnnnnnnnnnnnnnnnnnnnnnnnnnnnnnnnnnnnnnnnnnnnnnnnnnnnnnnnnnnnnnnnnnnnnnnnnnnnnnnnnnnnnnnnnnnnnnnnnnnnnnnnnnnnnnnnnnnnnnnnnnnnnnnnnnnnnnnnnnnnnnnnnnnnnnnnnnnnnnnnnnnnnnnnnnnnnnnnnnnnnnnnnnnnnnnnnnnnnnnnnnnnnnnnnnnnnnnnnnnnnnnnnnnnnnnnnnnnnnnnnnnnnnnnnnnnnnnnnnnnnnnnnnnnnnnnnnnnnnnnnnnnnnnnnnnnnnnnnnnnnnnnnnnnnnnnnnnnnnnnnnnnnnnnnnnnnnnnnnnnnnnnnnnnnnnnnnnnnnnnnnnnnnnnnnnnnnnnnnnnnnnnnnnnnnnnnnnnnnnnnnnnnnnnnnnnnnnnnnnnnnnnnnnnnnnnnnnnnnnnnnnnnnnnnnnnnnnnnnnnnnnnnnnnnnnnnnnnnnnnnnnnnnnnnnnnnnnnnnnnnnnnnnnnnnnnnnnnnnnnnnnnnnnnnnnnnnnnnnnnnnnnnnnnnnnnnnnnnnnnnnnnnnnnnnnnnnnnnnnnnnnnnnnnnnnnnnnnnnnnnnnnnnnnnnnnnnnnnnnnnnnnnnnnnnnnnnnnnnnnnnnnnnnnnnnnnnnnnnnnnnnnnnnnnnnnnnnnnnnnnnnnnnnnnnnnnnnnnnnnnnnnnnnnnnnnnnnnnnnnnnnnnnnnnnnnnnnnnnnnnnnnnnnnnnnnnnnnnnnnnnnnnnnnnnnnnnnnnnnnnnnnnnnnnnnnnnnnnnnnnnnnnnnnnnnnnnnnnnnnnnnnnnnnnnnnnnnnnnnnnnnnnnnnnnnnnnnnnnnnnnnnnnnnnnnnnnnnnnnnnnnnnnnnnnnnnnnnnnnnnnnnnnnnnnnnnnnnnnnnnnnnnnnnnnnnnnnnnnnnnnnnnnnnnnnnnnnnnnnnnnnnnnnnnnnnnnnnnnnnnnnnnnnnnnnnnnnnnnnnnnnnnnnnnnnnnnnnnnnnnnnnnnnnnnnnnnnnnnnnnnnnnnnnnnnnnnnnnnnnnnnnnnnnnnnnnnnnnnnnnnnnnnnnnnnnnnnnnnnnnnnnnnnnnnnnnnnnnnnnnnnnnnnnnnnnnnnnnnnnnnacacaaaaaaaaacacacacacacaaaaaaataaagttaaatctttgatgataatccaagtattactaaaagagtaaccacaccatccatatttttaaaagcatttgtttatgttcgggaattttgcattgaaaatgggttttaatttttgtagaattacctgaggcctctatcacaaacttacataaaaattgttcttttgaaaatttagttgtcttccataataatttatattttttaatcagcttctacactgaattttaataattcttcgttttccaatctctaataatatatatctgccccatgtatattttgaatatgaaacaagaaaatgtatttaaaataccatgacttgcatgtagaaaagtctctttcagctattaatgcctataagcatttacctggttatagtttaatgtggaaaagatatacataaaggaccatgaatcttaggacaccaatcttgaaaaataaagaaaaatggaaatcatatggaatcatatgatgctggggacattaatccatttattggattccctgaatatcttacactataagaggagttgtaatattgaacaattataggtaatatttgcccagccctttacagtatacatggtgctttcacactcagttcatttagtcctgacaagagttccatgcaggagatactattatcgtactgttgtgcaaatgaagaacccaaggctcacagctacaatgatttgctctggagtaacaggcagttagatggtgctttatattcttgaggctctttcaagcactcttttctatgatcctattcatgtattacttacagtacacacctttctgggtaagatttggtgttcagaaaatacaaacaggttaaactagagaagtgcagctttttgtttttttctttttttttgattgaaaaacaaggaaaaagtcatagctaagagagagtcaagacaaagagaaacctctgttttctaagagaagagtctgtttcacagtagaagtcatatttgagaatgagctgagtcaacacatcatattgttactttggcctactctgcttcagattctcaagactgtgtcttaatccctgcaagttagtcccagcttacgatgcatgggaaaatagacccagccaatgccaaggaccagtgacccagatgcccagacaccttcacttcagcagagaaggggcagagtcctggaaaatctaggcagggaagacttgcgcctctaagagtaaaaggcctcccagagaggacatggatgaaaggaggaccaccttccaatgccactctccaaagcaggaaacatccaaataaaggatgttgattttcaggaccccatcccttcatgagtgcttacacaactggtatatcctctcccgtctcttcctctggtagccaagaccttataccagtttgagtatcctttatccaaaatgcttggggtcagaagtgttttgaatttcagatatttttaaattttggaatatttatatcatacctcttggttgaaccttccagatacaaaaatctggagtccagtgagtatttcctttgagtgtcatgtcagtgctcaaaaagttttagattttggagcgtttcagatttcaggtttttgaaattggaatactcaacctgtactctctgtccttgttctacctctaccagaccctccccacaggaatgaatttagatctgaaaacttctatgtgcaccagtgtagctacattatgtcctacataagtaggacttcaacttagaaatgatttctgaagatgccaagggagtcattgtgtgtgtgtgagtgtgtgcatgtacatgtgtgtatatgtgtgtgtgtctaaagtaagcctaaactttacagtatacacaacatactatatttaagtaataaactcagatactcagattaaagtcctcctagggagctcagagtgcctgctggattgccgtattccctctgatataagctctcacaccatagggaaaaatggtaaactgacgtcccttgggatagacccagcagcaggtcacattaagagggtatccatggaaacaccaaatagaatgtagaaaccggagttcccagcccttcagagtacaccctaaccaagctactctgccacccatttggctgtgtaaccacagctctgcccatgggagctctgagactcagctcatcctcaaatatgacttcctctgtgaaacagcctcttcttttagaaaccagaggagatttctcattgtcttgtctctttttccttttttcagttaaaaaaactgtacttctctagtataacctgtttgtattttctgaacaccaaatattgaaggggacacttctttgctttggctatccaggagcagacgataagccatctccaacaaatgttctggatgggatggcttataattcatctatttcttgcctctagctttatcttactacttcacttttactctcctactctccctacttccattatttatttgcattctctaatagtgcataataaccaaagttattttattgaatgagataaaataataaaaaaataagctctatatgaattaattaagctatttcatgagtactatggtaatagcaacgtatattttgtattcactgatgagctgcttgaaaaaattggagagtaatctgtcatgcagaatatggatgagaggcctttccaagtgaaactctgggtccaattaaaaataactgtggagtctactaggtgaccatctgtgtgatgatggaccaattcactttgcagatccccctaaaccagaagacactcccatgaattcttatcaaccttggagtggggcagtaagcatcaaatcatttggccataatgagatgaaacacttgttttctaggttccatgggactagactttctacacagtgtccacagtcattgttctagaggtccttgcttgagaggtgacacttctggaatcctgagagtttcaagtaattaaccttggttgatgttagaatgatgttcaaaaatatctgatgatatcagccaatccactgagataaccttttgaagagacagaattccacagccaatatttggacatacttttacttgtgtttgtttctatctgttatgagtttcaaaggcttggcatatcttctacttaggtactctgacagtaaaatcacatacaggacagaattttaggaggaagcccaatccatgcaagtctcttatgatacattcatagcacaaaactaagacacctaagaatatttagcttccatcaaagcactttgtatgaaagtcagtactcctacaaacagtaaaatcatcttcctacaagaagtgactccagacctaatctgaaattgttccttaatctggagacagatcatttcctagagacccaggaggttagtgaatagtgaatgctgcccagtggcagggatggactctaccagcccaacctttaatttggcagaacctaccgcacacaggattttgctcaaaaatatcttaaaaggaaatgggcataaaggcagggaaggaatggaagaatgacagaaaagacaaagaataatctttgagaagagagaaatatggtgtttgctttcctgtgtgtgtgtgtgtgtgtgtgtgtgtgcatgcatgcccaaatatattcctacacctcaaggtgagagatgtctaggatgcgtctagcccagccttctgccccacacataattcatttttccaacgctgttgagggctgttatagcatttttctacttaaatatcgccaatgagagaaaactcactatttcactaggcaagtgacttaatattcagataactataatgtttagaaattttttctcatcatttctctgttagtcttctctttcctagcacagcatacggcctattataatccatctttcataggctaatcctaaacaagcatttgaaggctgttagcataatcatgatgatgatgatgatggtgactatcatcatcaatagtaaaagcacgtaatttttcttgagcacttcctgtaagtgctgtgctaagcattttatacttttatctgattaattctcacaacttgatgaaatagatccttttcaaaagttaattttacagatgaggaaactgaggcttatggagatgaaatctcttgccctggataacagaggtagtagaaaacagctggaattagacaccggccatctaacaaagatagactacttaaaaagtctgtcttctgatttcatgttagtgatttatatcggggagtatgtctgcaaatgtgtgttttcccagcggaggattatggagaccagatcccaccacttgctacatattctcatgcgcagagtcatcctttcagtgcattcttctctcgccacatcttgcttagaatggtgtgttttttaaaattccttgtatcaacataaatattgttggaaactatagccatagaaaattgaagcccagcagtttccttgcaccagttcagtaatttttcaaactgatccttcacaaactgaaatatctgaggcacaagagttcacttacagcagagttagaggaatgtctttccaagaacacagtgcccagcatctaatcgctcctccgtaaatatgtgttgaatgaatgagtggattgatgacttccctaaaaagatagtttaatgtctagagctgagagcagtagaaatttttctgtttattaaaaaaagccctacattttagctattctttttattaggttgagactgctgatatgtaagaggtttgtaattttctgttgatttgactcacctttgcagatgtcttaggctgcagttttactgagagtaactttttgggcattatgccttttcattgttaagcttccagaagtatccaatctcattaccattggaatgtcagatcacaagatcctctaacttgcctgggagccactcctctgagaaatctggcctcttatacatgttaagaggagttcctggcagtgtaaatatatgttttctaaactctattcctcgtgagctttcaggaacttacttttttggacaggtatttttaaaatgccgtctttgttgtctttccactgatgtgacatgttccacatctatctaaaggaaacaaagcaaagccgaaacatttgctgtaaggatccaggggattaggaaaagtggaagggaagcacttcggagaacattcctaaactttgtctcctataatgaaaatacctgattcttttcataggctgttctttatgtttttttttttttatatggtgaacgagatatggactgcaggtgtattctctcgagagagattgtaacacttctatcattgtcataatttttatggcttaggccacatgtccccaagttttagagacccagcacctcagagatatttatctgtcaccaatttagaaatgagttgctacattattgctcaacccctgggttggagatgctctctttctggtcttcaaaggtagctatggggggcccagggatattcacgcaagtctattttttttatgttgctaatggtatttggttttgtgttgcctttcctaggtttgctgggatgggaaacctgctcaaagtccttaccagggaaattgaaaactatccacactttttcctggattttgaaagtaagttccaaaaattataataatggaaacttttttacattccttatagattgttgataaggaagttataacataaatatttatatcatagttgaatcaaatccaaaggtcactgtattagtctgttctcatgctgctaataaagacatacatgagactgagtaatttataaaggaaagaggtttgactcacggttccacatggctcaggaggcctcacaatcatagtggaacagtaagggacgtcttacatggtggcaggcaagagagagcttgtgtaggggaactcccctttataaaaccatcagatctcgtgaaactcctattcactgtcatgagaacagtatggggaagacccgtccccatgattcagttacctcccatctggtccctcccacaacaagtgggaattatggaagctacaattcaagatgagatttgagtggggacacagccaaatcatatcagtcactatgcatttttttttctgaaatcatttctaatgtcattttccttcctttttccctaatttttaagaaatccaatggaaaatgtgtttaatgtacccatggttttctttgattttagaagtgatcaacttttgtagccctagcataaatagaggatcattttagtctttgctttccttttgaaggtcgtaagcccacatttattgagcacatacaaaggaaaaaagatgtgaagaaaaccatcatgtatttttcctaaaaatgtttatgaattactgtatcacattccaaagaaagtactaaggacagtaatttacaaagattcatataaaacaaatattgctaaatgtgaaagaaaattgtgatcaataccagaaataaggcttacagaatatttttagtcatttcctttattctttatgtattatttgattatacaaaccacttcaggattttgacatatatcccttttacccaaaaggttatgtttctcttatcaaaaactacgttttcttcaggtgaaatggcttaagaatcatgactgaaaaaagacagggattttttcttattttttgattgaatatattgacaaatgagaatgagtatatgaatgaggaacatttatgtttgctcaaactaagctcatgtttcttccttaactctcatgttcaccccttttcaaaattccaatttcacaatagcaagcacagttaactgtcttttttcccactaatcaccatctgctgcacactctaatgtactttaaactttaatttttcaaatattttatcgccattaaaaataataattggaacttccttgcatatagattaaaccttctaaaagaagtttgctaaggaaatgctataatacccttctaaggtgcactaaaccaaaagtgtaagctccgtaggtgtatttttttttttttggtgtctttggcaggttttaaatagctacttgaaaaggaaaagtgtccccaaagcttgtatgttctgaaaatacatttaatctagtttatagtcaatgaaagatgccttgcttctgatttaaatcagcgtgctatgttgttgttattgtttggcttggtttggtttggtaaggggtttagctagaggcagagcgagttgatatataaaatgggcctttttactggtttaacttttgatattcctctaaaaaaaaccacacacacacatatatgttgttcaaagaatggtttattaatttttttaaatgtgcaaaacaaattatctatatcttgccacccttcttttactatttacatgtttaattgttcccatccatttcttatcagatgcattttacattgttgcattcaatgtgtacaaaggccaaaatagtggtaacgtgtcccatttattcacaactgtgggggtgtataaaggcctgggagtaggagactaacgtgcttgtttgttttggaaaccctaaattccgtatgcttctgtgcatgctcatatgtacctcccagaattcagtggcctcacttgcctgtttagctgttcttggagtctcagatttccatgcttccagaaagaccagtgttgagttcttggtcaagtctaatctcaaaagcctttaaagtgatccaagtagaatttgcagggatttaaaataaatgcagtattattgatccaagtagaatttgcagggatttaaaactggttttcaactggtattctcctgagcatcagatttctgagtctatgttagaaaactccatccccccaccatagcacatagggggacgttgagaggtgcttctgtgcgcccccacccactactaccagagtactctgctttgcccagtctggtactttgaatattttcttaatgttttatgtaaagaaaggtcatggtagctaaacagagcatttagaagtctcaaattttgatgatagtttatagtactaaaactccatttgtcaatttaatttcctcaaggggaagaagtgtggactggattcccatatctggtagcttattactggggctagagctatagtatttaaggaagatatagaactataaatttgtaaacatatataaaatcctgcttattttctcatcagtcctatggataagactaactttattccactgaaattttgagaagataaataactagggtgaagtcacacaggaaatgactaggaaatcaagatgggaacaaagatctctgtggctctcctcctcccctggttttacttcccctaagtgctcaccaccagtagcttcctagaagagctacagcaatcgttctgtccctgaccagagagggacatcttagttgtctgcaaactaagacattccatggaaaaaaaatttttttatcctgaaaatcctatttcctaaagatgattttcaagaaatgatgatgggctggaggggtagggaaggtgggctgctatcgtgatttctccttgagtctctggatttcaattcagtccactaagggcatgttgaatatggttgtgagtgtacttgtnnnnnnnnnnnnnnnnnnnnnnnnnnnnnnnnnnnnnnnnnnnnnnnnnnnnnnnnnnnnnnnnnnnnnnnnnnnnnnnnnnnnnnnnnnnnnnnnnnnnnnnnnnnnnnnnnnnnnnnnnnnnnnnnnnnnnnnnnnnnnnnnnnnnnnnnnnnnnnnnnnnnnnnnnnnnnnnnnnnnnnnnnnnnnnnnnnnnnnnnnnnnnnnnnnnnnnnnnntggcatttggaatgggccttaagaatgagtggtttttctacaggcacagatagggagagttttttagcagatggaaacagtatgattaaaggcatggaaactggaataggaagggcatgtttgaagaacagcaagaggtccgatttagatgaaacaccaaatgcttgctggagagaaacggcggatgaaatggaaggctggcttgggttagaccatgcaaagtaaggctgccaagcctgggagcttagggctagatgtccagcactggggcttacctccaaagagaatagcagacatccctgagagaaaaccagagagctgagcagatgggaacattaggcatgcttatgtttaaagggggcttgagcagtccaaggatccatgagagaggtcagactgtagaagaaggaggacatcttactaaactgagattcctggaggcagggtctgggccccctcagttttgtgactcagcacttaacccatgaatgaacctcagtaacagatgctgatcccatgagggaacagagtgaagcgggctctatccaggcagtcacaagagcacatgtgatcaagaaggagggagtgtaaatggattcagtgctgcagagctgtcaagaagaatgaagcttgaaaagggactgatgaattaggcagtgagctgtccagtcactagtggcccctaggggagcagattccgaatttgttgctttgaatatagaggctggattgtaaagagttaaggaggaagagatggtgggaaggaggaaggctgaacagcatgttgtaacaactttaatgaatttggcacctctactttgagtgttaaatattctttttgaagttagtggtagaatataattgaactgggtcagacagatataattaagctgggtcaaaacaatacaaaattagacacatctgtccttaggtattcctgttgcatagatctgatttaaattctcatctgacctttacagtgcattctatatactttgtattcacatttctctacaaacacttaacatctttgttgttgtttttcatccctctacttctttttcttccctctctacttccttcccatgtctccatgtcctctttgaagtctgggagacagggagaaatgaaagattaatgtagcaaactaatctttcacgagtgatggcttcagtttacaggaagaagtatgtctgaagttctactcaagattgtgcaaccagacccaccattatggcacccaacttgggcagtaggcattaacctttcaatgaagtagtttcagtaattccaaggctgaaatgatcattagaaacatctggtgaaccttctttttatatggttacctgagactcacctaaaaaatcagattcagttgtttattcccaagaatccatttttcccacatttccaggtgcttctgatgataagctgctttgtgaaccacctttaattcatgcatccaggtgaggatacatagttagtgtttacaacagggaagctaacccatgcaactttttgagctccaagatccaaagtttggagtggaagatctccaagttaggtagaggttcaggtagattcaaatctctgcattctcacttcaagtaaactatttattttaatcagcaaataacttgatctatcaaagatttctttgggatctgagtggacatttctccaaagaaaataaacaaatggccaataagcacatgaaaagatgttcactatcattagtcatgaaggaaatgcaaatcaaaatgacagtgagattgaatttcacacccactaggactgttctaatcaaaaagagagataataaggtgttagtgaggatgtgaaaaaaatgggattatcatacaccactggtaggaatgtaaaatagtacatctgctttggaaaacagtctggaaattcttcaaaagtttaaacataaagctaccatatgatccagctattccactcctagatgtatatgcaagaaaagtgaaaatatatgtccacacaagaatttgtacattaatgttcatagcagcattatttataatagctgaaaagtgggaacaacccaaatgcccatcagctgacgaatgggcaaatgaaatgttatatcaattcaatgcaatattattgatcaattaaaaaaatgaagtactgataggtgatatgacatggatgaaccttgaaatcattgtgctaagtgaaagaagctagttacaaagaccacacactgttgatttcatctatatgaaatgtctagaataggcaaatttgtcgagacagaaagattaattgtctaggcccggaggtggggagagggttggagagaaatgaggagtggctgctaatgggcacaacgtctttttggggtgttaatgaaaatgttctaaaactgattgtaatgatggttgcacaacactaagaatatattttaaactgtttaattatgcactttaaatgggcaaatcgtatggcacgtgaattaaatctcaacaaagttgtaaattttttttgtttttaaaaaaggattcttttggaagatccaattcttttcttctgcctaatgctgacattattccgtcatcacagaatatattatttctcttcttttcctggtaactccactttttaaattgtattttcattgggacataatttacatgcactaagatgcactgatcttaagttcacattttagttggttttgacaaatgccacactctatcaagacacaggatattcatgtcactccagaaagttccatcaagccccttcccaggcagtctacctaccagaccccaaaaacagctactgatcaggtctgacttacattgtaaaagtctaatttagctaatctataagttttttaagttcatataaatagaatcatacagaatatgcttttttgtatgtttttcactcaatataatgtttttgacatccagccatgtcattacatgtatcaatagtttatttcctttttgttattgaatactcttctgttgtatgacaattcgttttcattttcctgttgatgatcatatgggctatttcccgtttggggctataattagtaattgtgctataaacattcttgtagaatatttgtgggcattatattccttgggtaaatacctaggagtggaattcctcggtgatagagtagttctatgtaacttttcaagaaaccaaagcaacacaatatacccttgtaaaaaacttatacatagcatatgtacccactggatctaaaataaaaattaaaataataataaacatgcttatacatacaaaaaaaaaagaaactgtgaaacagctttccaaatgagatgtgctattttacattcctgccaataactaagcaactccaagtgttccacatcttctccaacatttggtattgtcagtcattttcctgttagctgttctagcagtggtggggtagcatcccatggtgtttttaatttgcatttccataataactgacagtgttgagctctttttcatgtgcttattgtatagttgcttatctatttaagaaaatatcttgtcatgtcttttgcctagttttaattaggttgttcgtctttgtattggtaaattgtaggaattctttattgtactttgtatacatgtgttttgtaagctatatcttgcaaatatttttacctagtaggcttacctacttattttcttattgatatcttttcatgaatggaagtttcaaattttgatgaagtacagtttataatttttaaattttatgctaagcactttctgtattctaagaaattatgacctataccaaggtcacaaagatattttgctttgttttcttctgaaagctgtattgttttaagctttacatttagatcagtgactgatcttcaactaatttttgcatatgttgtgagaaaggtattaggtttattattttttcatagtccataatattgtagtagcacaggtggattgctttaatgtccattttgtaaatttgctaattgtaatatgtgtgatatgggctacttcaggactctctgttttctctgattactctattgatctaccttctcaccaattaataccaaatataacaaacaataggtcttagagtcaagaaagagtaagtcttttaactcttttggaagactgttttggctattctaactcctttacttttctaagtaaattttctaattagtccttagtttctacaataaaaaattctactgggatattgattataattgcatcaaatctatggaacaattaggggagaattgccatgtgtgtaatattgatttttcctatctgtgaatatagcacatctttccttttatttatatatcatttaattttactcattaatagtttacagtttttaatataaaagtgctgcccatcttttgtcaaatatacccctaagcattttatattttgattataccagcttttttatggttagtgtttaacatggtatatattttcccattcttttgctttcatccgtttatgtctttatcaatatagtgtgtttcttgtaaacaacatatagctggtcctagctttttcatccaggctgataatatctgccttttaggctgagcacagtggctcataccaccatacctttgggaggctgaggctggcagattgcttgagctcaggagttcaaggccagtctgggcaacaaagcgagacctcatctctacaaaaaatacaaaaattaattaggcatggtggcatgcacctgtagtcccagctactcaggaggctgaggcaggaggattgctcgaggccaggaggtggaggctgcagtgatctgagatcacaccactgcagttcagtctggatgctagagtgagaccctgtctcaaaaaaaaaaaaacttccttttaattgaatacttagtccatttacatttaattaatgtttacatatatgtttaattaatgtttgtatttgagcttagtatttgagtcaatacaattaattattgtattgcattaatgaatgtttatatttgagtctatcttggtgttatgtctatttgtcatatttgccttctttttttcttcatgtttttctgataaatcaaactgtttgggatactctattttggtactgtattttgtcttttctgttgactttttagttgtgtcactttttgcttgctttagagattataatatagacgattgtgatctgccttcaaaatctattctttacatagtaaagaaattaagaacttatcacagtatacctgcaaattaacaccttttcactttgtgcttttgttatgtattttgcttctatatatgccataagcttctcaatgaaatgtgtttttttattttaaattgtcaattatcatttaagagagagagagagcgagtgtgtgtgtgtgtgtgtgtgtgtgtgtgtgcatgtgcatgtgattttaataaggccttcatatttacttgcatatgtatttacttgttctggtgttcttcattccttctcacataacaaggtctctctggtgtcattttatccaagtctaaaaaacttattttaatgtttcttttagttcaagtctattagaaacaaattctttgagcttttatctgtctaaatatattgctatctaactttcatttttaaaggatacttacatagagttctagatccacaggtttgggggattttggagttgcagttattgtttgctttgtttttcttaaagcacttgaaagaagtgatcccattgtcttctggctttcattgtttctgatgagaagccatttttatcattgctcccctagatgtaatatgcttttctctggctgctgtcaataatttatctttatttttgttttgtagtagtttcactatgatgtgcctgggtatgttttctttgtaattatcctgtttatggttctctaagtttcctggatctatgaattaatacctgtcattaattttgaacattcttgcttattatcttttcaaatgtctttttctgttttcttcttcttcttcttcttctgggacaccaattatataagtaaggtgatttgacattgcttcacagatctcagatactctgttctattttttaaattctttttttctttgtatacagtttgtataatttttattggtctgtcttcaagtttactgatactttctactaatgataaatgtatcaaggagcttatcattagtagaaaccatctaatgtggaatttttcatttttagcatttcccttttcaatggcaaaaacagcaattacttttgcaccaacctaataaatagtctcaaaggattttctgaaattttccatttttaccatacattattcaacattatagattctttaacatatttttatagttattttaggatcctcgtctgtacatttcaacctctggactatctctagactctattattaatctttacttttctggtgatattttcttgctttgtgtttgttaatttttttcctttgctttttttgaacaaatgccaggcagcagaacagtgatgactgatgtgaataatacgtgcactcagaaaatcacatgccttttcttctgtcagtccactagtggggttgagtccatccaatctggatctgggctacactgttgcttgttatacgtggttcactgtaaatttcagatttgagggaaggatcaaagcaggccctttaccagagctggggatctgaagagtttgtctcagttttcctgtcacatcttcaggcttcagaaggccctccagaacacctgattctcaggatggcgtttctcaacctccttggcctcaccaggcagacagttgttctttacttactggagagtggctggtggctttctcttcatttttctgctctgtctaccacagcaggcctggcatggtgggccctagagggcaccttcccaatgctcctcccctcccgcagtcatagatggccacacttcacccttagataagactgagagtgtaggagcatttctcttgtgtatcttcccctgacccagagggtttctgtcttaaaatcttttttcctttcttgttctcaacttcttttgttagcacttggtgaaggttcatggaagagactttgcaggctgacatagactgtccttctgcctggagctcccagggcctctcagctttcatgacacttcacactcttctttttacagtgtgtgaagatgtcagctattttcttgttacctgcatttatggcagctttctccttttaccatttctctgtcaaacttgaaatcacctgtggtgtcatatctcctaggaaagtcttgtcaccttatggattataattcattaaagacttttgcaacctcaactttcttatagtcaaaaataacaaggattttgtagagtatctaacttgttttcttgttagggtgagcgcaatattctttgtgaattttacttctttttaaaaaatatgaaaatgtgttacatatttatatctaaatgtgttacagatatatatctaaattaacattattttgtatcatctaatatatagtatgtatagatatttctctgattttctcaaatggcatttaataggtttttttaccttaataagaattgaaatgaattcacaaaatatattggattatgtttcttttcttttttattatggtaagaagacttaccatgagatctaccctctgatcagattttaagtgtataatacagtatttttaactgtaggcaagttgttgtagcatagatctctagaacttatttatcttgcataatggaaactttatacccattgattagcaactactcattttcccttccccatgcccaggaaaccaccattccactctctgtttctatgactttgactccttgaagtacctcatgtaagtggaatcatgcagtttgtgttttgctgttacttgtttattttgcttagcataatatcctcaaggttcattcacgttgttgcatatggcaggatttccttctttttttaagactgaataatattccattgtatgtatagtctacatttcctttatctgtttattttaaatggaaacaactcaatacttttggttcaatttttcacattatcataaaaggggtattctacgtgctaagcttctgctagtcgtggtgtgaatagctgcaagtttacactctactggaggaggcagacataatgaccaacatcaataatgcaatattggtaaatgctgtagcagggacacgacctgtgctccaggattcataggagagaataactaatttgatctgagaaaagatagaagagacagttgcaggaggacaatcctgggaagatttccaagacagggtgaaataatagcttcgacgatgccatattttacatcttcctttctgagaaactttcttagcttccacttacgttgttcctgaaaaaagtctctatattcaatgccatttagctctcactgcatgatgacttttattatactgttttactaaattgttactgatagttcgtaactttcactttaggatgtcagtcttattttattaattacttcatcctccgcatcacctgtcactgtggtaggcatataacaagtacccaataaatgctttctgaatctaatgatcctgtcctcaccctcctaaggtccttgaggacaggaactatatcgttgaatccatatctcccaaaagtgtctggcatcattggcacttaataggctgtattagtctactttcatgctgcttataaagacatacccgagattgggcaatttacaaaagaaaaaagtttaatggacttacagttccatttggctagggaggcctcacaattatgacagagggcaaggaggagcaagtcatgtctcttacctggatggcagcaggcaaagagagagagcttgtgcaggggaactgctctttatttatttatttatttatttatttattttatttatttatttttatttttttgagatggagtctcgctctgtggcccaggtgggagtgcagtggcgcaatctcggctcactgcaagctccgcctcctgggttcacgccattctcctgcgtcagcctcccgagtagctgggactacaggcgcccgccatcacgcccggctaatttttttgtatttttagtagagacggggtttcaccgtgttagccaggatggtctcaatctcctgacctcgtgatccgcccgcctcggcctcccaaagtgctgggattacaagcatgagccaccgcgcccggccgggaactgctctttataaaaccatcagatcttgtgagactttttcactatcacaagaacagcctaggaaagacttacccccatgatttagttacctcccgctaggtccctcccacaacatgtgggaattcaagatgagatttgggtggggacacagccaaatcatattattctgcctctggcccttcccaaatctcatgtcctcacatttcaaaatcagtcatgccttaccaacagtcccccaaagtcttaactcatttcagcattaactcaaaagtccaaagaccaaagtctcatctgggataaggcaagtcccttccacctatgagcctgtaaaatcaaaagcaagttagttacttcctagatacaacaggggtacaggcattgggtaaatacagttccaaatgggagaaattggccaaaacagaggggctacaacatgatctcttttgactccatgtctcacatccaggtcacactgatgcaagaggtgggctcccaaggccttgggcatctctgcgcctttagctttgcagggtatagcacccttcctggctactttcacaggctggtgttgagtgtctgtggttttccaggcacacagtgtaaactcttggtggatctaccattctggggtctggaggatggtggccctcttctcacagcttcactaggcagcaccccagtggggactctgtgtgggggtacccgtcccacatttcacttctgcactgccctagcagaggttctccatgagtgccccacccctgcagcagatttctgcctggacatccaggcattttcatacatcttctgaaatctggagattcccaaacctcagtttttgatttctgtgtacctgcagactcagcaccacatgtgagccaccatggcttgggacttgcaccctctgaagccacagcctgaactgtaccttggtaccttttagtcacagctagagaaactgggatgcagggaaccaagtccctagactgcacacagcagagggaccatgggcctggcccgcaaaaccattttttcctcctaggcttccaggcctgtaatgggaaagttctctgacataccctggagacattttccccattgttgtcttggcaattaacatttggctcttagtaacttatgcatatttctgcagccctcttgaatttctcctcagacaatgggattttcttttctatcacgttgtcaggctgcacattttccaaacttttatgctctgttttccatttaaaactgaatgtctttagcagctcccaaatcacatcttgaatgctttgctgcttagaaatttcttccaccagataccctaaatcatctctctcaagttcaaaattccataaatctctggggcaggggcaaaatgctgccagcctttttgctaaaacataacaagagtcacctttcctccagttcccaacaagtttttcatctccacctgagaccacctcagcctggatttcattgtgcatatcattatcagcattttggtcaaagctattcagcaagtctctagggagttctaaacttttccacattttcctgtcttctgagtcctccaaactgttccaacctctgtctgttatcaagttccaaagttgcttccacattttcagttatcttttcatctgcactgcactgtactggtaccaatttaccgtattagttcattttcacgagctactgataaaggcatacctgagactgggcaatttacaaaagaaagaggtttaatggacttacagttccacatggctagagaggcctcacaattatggcagaaggcaaagaggagcaagtcacttcttacgtggatggcagcagacaaagagagagagttgtgcaggggaactcctctttataaaaccatcagatctcatgagacttattcattatcacaagaatagcatgggaaagacttgctcccatgattcgattatctcccactgggtccctcccacaacacgtgggaaatcaaaatgagatttgggtggggacacagccaaaccatatcataggtgcttgataaatgtgcttcattgattttcctattatctcataacattctactctctgtcttcaattctggattttatctttctctcataccttggctgggtactactttggaaatgtagaatatttgatcaatgtgttagaattaactgcagggagaagtcagtctgttagtgccaagaatcagtcgtccggtggttaatcaccaactgtctgagacactgtcagggatcaagccttggtagttttcttctgcaaatgtatgtttgtctcctcattgttgtacacatccctgaagggagaatttagatggcatcttatgcttatattattctgtgtcttatccagtgtccagcctagggctgggcatgaaatgtaagctgaggaacactggctttgattgacagtcaccaatgaagaaactatatgcagaacatctcttgcattcctcgggcagaaacggcagtagtggggtgtgggttcttagtgtgtcagggggcctggagggatgaaatatagcacataaatatagggacattggaagaacatgatctcttgttcaagaagcttataattttgttgaggagataagatgtaagcacatggaagagacagtagtgcaggtagtagggaagaagtctgtaacagagcagagagtaagtgatatgctagccagaagtacaagttctggatttgactaaagaaatgtttcttgaagacagtggctgaaaaaaatggttttcttgcaagacaaactcacattaattaacataataggaatgccaagatcagtaatggatgtggtgggggctggggtgtaaagaaagaaattctaaagtcttcaaatcattgtactcttaaaaatactctgactatgttgacctattcagaatatagactcctactctttaaaacaagggtgttgagtcagatcagcctatcatctgggatcgttgctgttgttgctaactcagaccactccctgccactattggtttcttctttcatctgttcttctctgctgccctcccatctgctaagctgttcagaggaggcttgataatcttggaagaagaggggaagtatcagatgtctttttgtctagtatcctcattttacaaaagaaaacaaacaaacaaaaacagaacatacctgggaagcagttttttgatggcaatacaaagattccgtgacaaaaaaaaaaaaattcattttttggcacttttgctttttaagtgctttaaatctattccatcatcttcattatgaccctgcaggtagggaggagacaggctattcttagcttccctctcttttaacaagaatgaatctggacccagagagattacttggcttgccctgaggtctaatattgagtggcagtgaaacctggtctcaaaaatgccatccttggactgctcccatcacagggtcccactgcatgtgaagaaaatagacagcctgcaggaactttgaccctcctactcttttcagtcctaatgtgattgttctatagaaaagggcttcgggccctggtgtaagatgactaatgtcctctaagagtaaatatgccggccctgtcacacatatttgctggcagaccttttccattttattctgttttcataaacagttagtattgtgctataaatcacttccattttacatccccacatattaataatagataattatttatgcttcttagtttagcctgaaggggaaagagattggaggagagaggaagtgggtgggaaagaagggcagaatttaatttacagctttggcgaatccattttgctgtactttttttcagtgtttatacaacagtcatggggcacagagatagctatatatcctattgatgaaatgccagggcatctttcaaaaccaaagacatctctatgtaaatggtgttttctactcacattatcttagtttagtttgattctctgtcaaattgtccatacagtcctaaacgggttgttaggaaaatgtgtatatgttactggtgcatttgaagacagtgtaagtccttggccgatctataaaaattagaatacatggatttgatagcccttctccagtgcaagccctgctgtcgtgccctgtggcaggttcaccgaagaccttccccaaaaacaaagcacatagccaccttcttctccattagcatcaaggagtgccgtgcattggtttaaataaatatcactcttctccacaatgaaatcttccaccctgcctcaggtgacagcaaagtattcacagttaatattcaccagcattaacaaattgagcccctgcaaacaaaactaatcctgtttaactatcttaatgtataaggtacttatgctattgcaaattctagacactttgaatttagtgagttcttgacaacaaatgtatatgtgtgcaaggtcgcagggcacatgatacattttcaaactttccacagtagcaagtccagaacaggactttaaatcatccccccacataatgtcctggatacacttgttccagggctcctggaagtattggtttctgaaactgcccatgtaaatcacagagatttttaatagctttattgttagacaggagtaactccagctttatgtaaccattctcctcaatttccgtgaaataattggcaatggttagaagcttagaatatggttcttagaaggaacattaccaaagaaaacactggctgcaactagaaataaggacccattttcaccagtaacattgttggtgtgtgtgtggtggggactgtttgtacctttctttgactaaagttcagtctttgtgttaaaaatagaaaagccaagcacacagttcacagctcctcttcactcagcagatgctttaaggggttgctgatagcttaaatttagtaaccttttcaatcactaattcttcagggttcctttcaagatgtctttccacgacatctgaaaacacaataaatttcaaaaacatgttcaccacttgaatctgaatatcgagaaggccaagtgtaagactccaaagcctctcaaagggattttccagatggcaaaatgataacagctttcagattagaaacgtaaacctaagtgcagtttttcactgtgtcagactcaacaaataccctattagtgtgttaaccacactggtgagacattcaggccgtagatcaataatggatgatttgagaacatggatgttaatgaaagagtggatggccaatttgactgtaggtaaatacctacatcttaatggtaaccaggagagatataactatacaaaagccatttgagtgcagtgagctatgatgataccactgcactccagcctgggtgacagagccagaccttgtcatttaaaaaaataaaataaagtcattttgggagtagagacagaggagaggatctaaacgtaataggacctttacttactacactgctttcaagtacccagcattctatcccatcttaccaatttcttcgtgtattcattgattcatcacacttttattgcctgtctccaatggccttctcaaaagatctcagaattcaaagacaagcagaagaaaaatcacaaaacagtgtgagtagtatatttaaattgttcaactgtttgttcagcaaatttttcttgagcatctactatgtgccaggccctgtgccagatcctagaaatataatgtcaagtgaaacagatatgaccagagtcctacagtctaatggataagattttcattaattagttctgactgtatgattatttagctgggggatgaaaatagaatgaatcatggacttccatagggatttaggccaatgtcacatgtcactgtgggtcacacagttcttttcccatttgaaaagagagacagacagacagactagagcttctcccagttgtcactctcttccttgaaagctgacaccacttgtgatttgagtcccctgagaatcttatggcactctggcccagaaggcaggaactgtgctgcccgtctaattatagctggaagaggtgacttcagtttcatgacaggaaagaaggaagaaattggacatccaataaaaccaacaaaattttggatgaaaatgaggcaacatatttctaagcctggaggaaagatggaaatgatggagtggctttctcctaccgcatcccaccactgctaaaccacatgagaaatatttctaataggacaccaggaaatctgccaaaagaaacagtttcttagggaggctgaggactgagggtcctgtcttatagatcaccccagctgccaggagagaattactgtaggatggaaggtatttgtttaccacagcccctgaagtccgcctcctctgggagagaagtggtaccagccccctggttactcatgcaactctgtggtcatataaatgtcagtgctgatttgttgaaaggtcccttcacctgggatggagagcgcagcttgtttgtctctagtgccagtacctttttcaggccaccctatcagaaacagtcttatttttgaaacagttaagagaggcctctatttttaaagactgacttgaaatctttctttttttctgtttaagtaatcatcaacaggatttttttaaaaaaaatttccagctctcctctctggcccacttagttttaattctgttttgtctaaaacttatcaagcggtgatttgctagggtggagccaggtgaccgctgagattagaaggctttctgttctggcctcagagtgccttcttctttcccatactattttataaatatactcaaatagtcttagccctgagaatcttggtcactgactatcttgcttttcttcttctccaaatacatacatctctaggaaactgtctttgtttagcttatgatttttcaaaaggagacaggatttgaatagtcagtgttttatttttatttgttttctaggctcgttgctttgcattttttcttatgttttcttccctgacactttccttactcagaaactgccaggcttaccctggaattctattctaccagaacactttctccagttacgggcctcctagcttgtggatttttaggtttgtgtttaagacacttgcatcactttgagaaaagtttgagaaagcagaaaaaggtaaaatacaaagtgattaatattgtgagtaacatcatatctgagaaaacttaccaaatgtttttgggaaacactgataggccataaaacctgaaaaagttcaggttgaataccccttatccaaaaacgcttaggaccagaagtgtttcagatttgggtttttttttttttttttttttctgattttgaaatagttgcattatacttaccagctgagcatcccaaatccaataagctgaaatgcaaaatactccagtgagaattttctttgttgcaccatgtgggcatttaaaaacatttcagatgttggagcatttcagatttttggatatgggaagctcaacctgtaataaatgtctttttcccttactgtctccagtagattgttttctaacctagcaggtttgtttgtttgtttgtttccccagccttgctttctccagctgccaagcctttgtccaagctgtgctctcttcatgaatatactccatttcaccttccattgccccagctcaagttatatcccttacatgtaactgtttccactctttccagaccacattcatcttctctttctctgagtccttgtgtacagacattccagtacctccttacttcctagttgaaatggtctcattctttgaatgtatagtttgcaaagtttctggataacctatgaggacctatgatcttttcttcaaagagaattgccatggcactgatgattttcactcttcatttcttaggaaactctaccagtttctcaggtcttaggcagcaggacctggtgagtcacctagtctaaaaatctccatgggctccggtcatggagagtttaggtaactgaagcaggagcagccaccccgcctcagttcctcaccgatctcagcatttctgaacaccaagtcagcatagccagtgccccacttcgccgtcacttatcttgtgaattctgtcttttgtttttttgttttgtttcattgttgttgttgttgttgttttttgagatggtgtctcaccctgttgccaggctggagtgcagtgacatgatctcagttcattgcaacctctgcctccaggattcaagcaattctcctgcctcagcctcccaagtagctgagactacaggcatgcaccaccatgcccagctaatttttgtatttttagtagagacggggtttcaccatgttggccaggttggcctcgatctcctgacctagtgatctgcctggctcagcctcccaaaatgctgggattacaagtgtgagccactgcacccagccctgtcttttttttatccccagagaaacactggtaaacaaccctcttgcaggatcagccccttgtactcccacgaagattagttaaaactgagatttgatctggtgagggttagaccaggtgtaaactcggccttcaccctctgttagtgaggtctgctgcaagcatgctgtgcctcaggatctggatatttgaaaacagagtttgataagataacatctgtcccctctccatgagcagtgcctttgttttagatggagagatgaacttccctactaggccagggagataacctattgcataggaattgcaagataaataaaacccaatctttactacctctccaccaccacccaccagctcccatgaaatgctcacgggaacaagaatacatgctagctccgggaaggtaatcaagtgagaattcactgaagagctcaagggtgcttctgtgactgttagaatactgttttcattatggaagcttcagtgtgtcacttgtttttgtgggtaacagttatggtcaagaccaaagataaacagaacatttgtctttaacatgaactccctgcacgtctttgccaaacctcctgaacatgagatcaggttcaatgagaagtgctctctacatacccatgtgttcaggaatgatatgcctctgtcgtggtttgaaggattttagttatccagtttttaagcatatttttaaatatagaaatacaaggcagactgtttttcccatctacactcagattcacagattttcaatcaaagcagaaatattcagttgcttctcctttaaaaagcagacccaatacagaatttcagttttacaagatgaaaggagtcatggagatggagtgtggcgatggttgtacaacattatgaatgtgtttaatatcaatgaacagtacacttaaaagtggctaagatggtgaactttatgttatgtgtatttaaccacaataaaaatagtaattgaaaaagtaataaaataataaaaagaccaaaacatgtggactcaaaaagacaatgcttattttttctatcactcagtgccctgttttacgtagcaggtgtgcaaaaaaattgttccacataaataagtgcctatgatgactcctgtgtgcttgttttatgactataaaaagatcattgactattttaaactgagtaatgggcagaagtttcatcagttttcccttcctagcatcctagcagcttattaggttaaagagtaaataccagagcagcaggaatatgataggattgtcaagcaggtaaaactgaatatccatcctcctcccaagctatttgtaaacaccagcactctgtctctcggtttccctgtttcttagatgctcagcctacagaaggagagagagaaatctggaaccagatcagcgccgtccttcaggattctgagagcatccttgcagacctgcaggcttacaaaggcgcaggcccagagatccgagatgtatgtcaatgatcacgctgaactgacaacacccgaggaggggaaggaaaaccacacatgcacacagacacacacagcaagattaagtaatagctacagtatttcctagagtaccaggaagaacaaggagggtaatgtgtccttaaaaacaaaatgcatgggccggctgcggtggctcacgcctataatcccagtactttgggaggctgaggcaggtggatcacctgaggtcaggagttcaagaccaggctggccaacatggtgaaacccagactcaactaaaaatacaaaaaaattagctgggcatggtggcaggtgcctttaatccctgctactttgggaggctgaagcaggagaatcacttgaacctgggaagcagaggtttcagtgagctgaggttgcacatcgcaccattgcactccagcctgggcaacaagagtgaaactctgtctcaaaaaaaaaaaaaaaaaagagcatgaatcgccccttttattctagtgcattaatctgagcacacagtgctatagattaatattacccattctcttctcaaacacacaagtgatattgcaggactcacatttaaacaataatgtatcaatatgttatttcatttaagggaaacaatgtaaagtctgtgaacaacagttgaaatatgaaccatgaagtctgggtggacatgtactttctggcatttggtaattactcaggcaggttccaccagtgtgatacacaacagccaaaaccatcttgctttcagtttgtcatctcaaatgtcttatgagattttctaaaattaacagaaaacaaaacaacaacaaaaacaaaaaagaaaatcaccactttgacttttgcaacttcgcaataccttaaaagcaagaaacttcacactctttttatgtgaaagcattagttttgtggcaataccaacacatacatatacgcatgccaatacacacatacacacacacacatacgcacacatgcacacagtactgccactgctcccatccttctgaaaagaacaccaccaccgtcataatcctcaagttgctgaaactcagacaaggcggagtttctaaaaaagtaacagtctagtaagaggtggtttttctacttaggggtcaccatttaatttatacaatttaggtaacatgacaaactggcaggaatgcaatacctattaaagataaacaaaatgtctacagaatttgcactttataatgagcagaattccactttagaggagtctaatggtgatggagagggctgagtttcttccaatttagatgtgaattttttgtattcaagataatagaaacaagtaagatgacacaggatgtaattgtagagccatttgctgtatgttcaagtgttaaaatttccattcatattgagcatgttggaggaccatccgatgaaccggtgttgatttaagtagtatacatcagcaaagtatagcaaggattgtattttaaactaaatcttagggcattttgatgtggagcttaccacttctttttaaacagtcagctctactgtgtttttgcaggcaattcaaaatcccaatgacattcagcttcaagaaaaagcttggaatgcggtgtgccctcttgttgtgaggctaaagagattttacgagttttccattagactaggtgagtatgtatttgtagttttcatggcccacatacggagttctgttttgatgtttgagtaggtagtgggaacagcgtggcatattggaaaatgtcccacatccatccactgtatcaaatgagaggccatttatgagcaacaactcttgtcattttcatttctttcaatccaccacaaagttcttcccctgaagttattggcccatttagtgtgtctctactagtgagtatcttcttggtcctgttctcatctgtgtccaattcttaatagttttactgtgggctgatcacatttctgaataacagagaagttaaaagataacaggttacctgctcacccaacaaataacttgcttgtctggagtcatatgataaatttaatagagtaaaatgcaagaaaaacaatgtaacattatttccttaagctttaaaaaactgtgcaagtacaggatggctttgtagatgttgagtaatgccaaatctggttggaaataggatcaatgtgaccagcaatatgacaaaatcactccccagggaggatgcttcattggttaatacagtatatcttgaatgaagaaggcatgttctactctacttttgccataaaatgagtgccacagattaagaggaaaacagagaacttgaaataccttgggggagtaatgaccgtgatgttaagaggactagaagctgagacgaagggaagtacttgaatgaaccaaacccgttttccaagaagagagggtttctgatgactctcagatagaagagagtaaaagagaacatagacttctttctatgtttcctcaaagggttgacccagtgaatggaaattctgaggagccaaatttttgctcaacagaaggaaaacaattccttacgagagcaggccaaggtagaactggctgcctcaaaagagagtgtgttcttacagatggaaatatctcaaaaaggccagagatatcccggtagaaatgctataaaagttatgtaagaactacatagagcagatgtctgcaaacttttctgtaaagggccaaatcataaatattttagagttgtgggccgtcctgtcttttttgcaactactcgcctctgccactctcatgtaaaggcagccctagtcattacataacagaatgagcacgtctgtgttttaataaaacttgtgtttatttacaaaacacaagtaatggaccggatttggctgatgggtcataccttgccaatccctgctttagaggattggttaaatgactctgtgctattagaaatatattgaagaacaagctataagggactgtttagagaaacagacaagtgggagtggtgaaactgttgcaagaaaaataatggaggtagatagggcaatgggttcatagaaaaatattcttgggattaggttagaatgtagatgcagagaaaagtccaataggggcagaggtctttccctgcaaagccggtcatctaacccatgtgtttagggcaccgtctcatctcatcctgaatcatgaatggctgtctcatgcacatgacccaaaaacacatatctgtggttttctaacagtgtcagaaattgagattactaaatatgtccaggtccagctgagcttagaaagaaatttacaaaacactgtggccatggggggtttcctcaggggaggctgcctgcccagccatgtgggattccttctcttcctcgtccacatgcagcacacctcacgtagttatcgggagagactcaagcaggtgatctccgagattgtcaactgaggctgggaattgtgttctttgaaggacctcggtgggccacctccaacatatctatttatccctttgattttcagaaaaagctcttcagagtttattggaatctctgacttgtccaccctacacaccaacccaacacctggaaagggaacaggccctggcaaaggagtttgccgaaattttacattttacccttcgattcgatgagctgaaggttaggccaaatgtgctgtgaaaatttaataaacttgtactgagtacctactgtttacagctgttctgttagtgctgtggggtgggtggnnnnnnnnnnnnnnnnnnnnacatataatgtggtgagaatttgcattcccatgtggtaaaagtaatttaagatgatgatttgtatatggaaattttaaatctgccaaatgaaatcagagaaaaccttttcaagtatctgttccacattgagaccaaatatactttccctgaaatctagcccacagggcatattttaaaataatgaagttgtgggtccttatttctaaccagaagttgctttgactcttatgtaacaaagagaagtcctggagtatttataaaatctagtgtctgggctcctcctaatgcatataccccatctgatactgagagatgaccttcgctcttgtcctctgaatttcagatgaggaacccggctattcagaatgacttcagctactacagaagaacaatcagtcgcaaccgcatcaacaacatgcacgtgagtccctgggtcgccttgacctttgcacccttctccatgactcttttgatttctgcatcaggcagagcacagacagaagacaatgtccttgtctgtaattcagttccagagaaaagtatttggaggatttggactttctctttataaatccatcttctcttcttattttcatcagctagacattgagaatgaagtcaataatgagatggccaatcgaatgtccctcttctatgcagaagccacgccaatgctgaaaacccttagcaatgccacaatgcactttgtctctgaagtaagtgaagttgagcaacgaggtgcttttttccttaattccacacaagagctgcaagcaggactaatgtacatttgtgtctcccatttagaacaaaactctgccaatagagaacaccacagactgcctcagcacaatgacaagtgtctgtaaagtcatgctggaaactccgtaagttaaatcagagatgtattcgtggttgagacttcacccagccagtgtctgttaagatgatgatgttaatgatatgtaacatttgggtcaacaccctaaagttttcatgtatattatctgctttaatttcactaagaactctgagtggtaggtgtcactatcactactgcatagctgaagaagctgaggcccaaagtggttgactgacttcccaacaactgcatagcttgtcaggtggcagaaccaaggctcagatcacagatgctgtagaagatctgtaagaaccaaatggagggtgtgttaaatgatgggacatcatgataaatatattgtagagaagatataaaaccaggagttgacatgataagactgtttcaagagtgaaaatggaggtctctctctttctctctctctctgtctctttttgtacctaaactagttgctacttgttagatttaaaaatgattgagaatattgaggatgaagcagcatggtaatctgtgctcaaaattctgagttccatttatggctgtagcccctactatgcctgtaaataactggcctgacttcctgagcctcgggttcctcatctaatgaagttcccataaggccatctactttgcagagtctttaggaagaccaaagccatcaagagtaccttataaaatctgatagcctgttcaaatgtaagatggcattaatttcaaatatttcacttgtaccaaagttaagatttattccaaggcagaaatagtaatcatcttcattgcagagccaattcataatgaaatagatgctaagaaagcctctagaaaaaaagcctctagaattggcctgaattatctgaatcatcagtgaccctgtcaaggtaagtgaacaaaattcaaactctacaaatactcttggatgctcaatgaatgatacatagttttttaaggtatttttgccaatccaatacaatctgcagcctgtgttttaacaaaggaagttactccgactggagacatgatagctgctccgtagaaatgagcctaattctttttctctgtaatgaagccattactctctataatcttggacagccagagggacctgctataaaatattcaagattgataggtggaggagtgaggtacatgatgagctagcccgctgaagggcagatgagaagggaatttactgccctttaatttacttcattttcacactgaattgctggttgaatagattcaaggagaattatcatcatggatttcctcagaagcatattaactggttgttgcaggtctgggattgttcccaagagaggattggaggcatctaaagtatccagttgtggggccaaagaacgcacatgttctgacaaggaagtgacgccactgctgtttcttctcttgcagggagtacagaagtaggtttacgagtgaagagaccctgatgttctgcatgagggtgatggtgggagtcatcatcctctatgaccatgtccaccctgtgggagctttctgcaagacatccaagatcgatgtaagaatagttgtgaaatgtgctttccaaataagggcccatgaatgttgccagaccttgtttttcttcctcaggcacctcaggacctctccactgagagtgatctttctaagatgcacagcccatcctggcagctgtcctcacagcaagatgtccaggctttttcttgtgcttaggaaaaaacactcaacctcaaaagcacagcagcaatgttatgatgctgatcccctcagtctctaatggagctgagcaaatgaacagtcacttagttgcatgcagtcccttcatttacccagtgtgctgtacaaatagatggtttctattctatgtgtgtcctattgtgaagagttgggagatactgcattacaagacactatggtcaaatcccaaattacctttcacttcctctcccaccactacctgttgctccactcatgtcccatgcctttcctcatcatttggatatacgtgatatgtgtgagtcctttctcttgccgagagagcccttcctcttcctctctgatgggtgggttcctttcagacatgtttcaaacatcgcctcatctaagaacacattttctgcataggacaagccttcttgcttctctggtcgccagagcactcaccgttctgtattttctgactccctcacagacaatttcttgacaaggacagggaccataatctatatacctcatgtctgctctattgcctcacacagtacctggcacatagtgggtggaactcaacagacacgctgtaggtgttttgatggatgaatgaatgaatgaatgaagataattgaaaacacatgattttggtgcacagttgctttgctgttgattgtggcataaagcacacctcctcttcatccagcacttgcctctagcaccaacccaatagtgtattccatgtactcatttaaagcctttaaagtgcagaatagcatctcttggtagtaacttacttactccagtatagccgagtctgggtgacacactgtgttcactcatctgcagagaacagtgtcctgatgctctggccctatgcaagagaaagtctacatgcccaggagggccataggtctgaagaatgcaagataatgtatcaataaaaaatgtaacttggattacttattttaaggttctgagttcgtagtatagttagtcatgtttcttcatagactctttattatttttaatgtaattatttctatgtaccaagaaaataaatatttatgtgaaaaaaattttgacacttagaaaatcaagacatagtaaattaaatatatcctgtaataacctcacccataggcagaggatcaccgttcatacagcagcatgcatgtgtaccttcttttagtatagatgcttgtgtggacatgtgtgtggatgtccttaacaaattagtaccctgctttacgtgctattttgaaacatatttcatttacataaaagtgtatcatgggcatttttataccaataaatatttttactgtatcctttgtgaggctttaacattttcatactatagattgagtataaataactctgtaaatattatttgactatggattgagttcattacctgagactcataagatattctcattaccatagccatttgttaacttgtcacagagtcaacaattaaaaatacactgggtaaaattatgccttgtagccctaatctttaaaaagcttggctttatatgttatttactgagtctttcagttgaggctgtaaacagtatatcatgttaagtcttcacgcatagtcttgatgaagtttgcttttgtccgtggaggtcaaaagcactacgtaaggtttgttcatatggatgtttgcgtgtacctctaaggaagtttcaggcttaataagcacggtaaaccatttgagatgggccatttttttttacgacatatagggtctccattcagatactagtctgtttctaagccagcagttatagtcactgggctcgtaaatcattagggcatcagcatcaactgtgaaaaccccaggatctcttcgtgagggcctgagagaggcaggcactgtgtgtgtacttacaaagggcatgctttggagtgcagaatagacatgcagtgagctctggaaacctagggggagggagaaactcgttttgccgaagagcagagacagagggtgatgtttgaggtggaccttgaagaagatgtaggattatcccaaaaggacagagggaaagcagagtcctccaggcagggggaatcatccaagtggctaccaaggcggcacaagccatttattaaagaaatgctaattgtgaatgccaggaaaggagggtttggggagatggtgttttcaattgatttccttagaatcttttgaaatgacccaataagtaatcacctcttaacccctgtctccatctcagattttatccagaattccagaccccatttcccatggacacctgaaatatggccatccccaaaacagagattcccctccccccacaaacctgttccttctcctgggttcccgtctcaggtatttcatcgtcctccaaccagtgtctaagccagaggctaaaattgtccctgagaatgaggaatggcttcttcaccccatatctcatcagtcaccaaatcctatggagttgacctcagattagtccctgtctctacttgctcctccatgcccactgctgctcccacacctcacaccctcaggggctctcactgccccttctctctctgttcttgcttccttctggtccttttccatattaaccacatcactagattatttaacacctatcaaggatgttttccacaggtaaagcccccagctcctgaacatgctgtcgaattcacactgcatctggccccaactgcatccttgacagcatcttgttattcatacctacagcttaaatcaccctaagtggaactccggattcccaaacagcattccctgctcttccaccccttccacatctgcattgtcactgcttcttaggcctggttcataagaacacttccacactgtgataatcaactatgggagagggacagaatctctgcatccctgggcctgatgccatcccaggtctggggtggcatatacctggcatgcttgtagcttctcccaatccggtatgcatgacagacacctctcgtttgccatgacattcttttttgatgcacctgtagtgatcctcacatgattcccaaccctgttttctggcagcctccatcagtctatcagggtctatcaggccgtaagataaaacttttgacatgcaagaagcacaatgacagaaaatgtttctaagggctgttacaaaaggggccctaagtataaccaaatccaatatataacagcatatgaatagctttgcagaaagattcttgctttgccaaaaaacactccaggatatgcataatgtaatgtgatctatataaattcagtttccatgcacttcccaaattacgggtcaactatattatacagacacaaaaagctaagacacttgcctaggtttgtgaagatactaaagaaacaagcatgaaggaaactcaggcatttagcatctgtgaagttcacattctgaacagtggcccttcatcagtcctctcaaagatggctgagacatagacttggacctccaggagctcctggtctagtgaagaaagaagttaatatgggcactaaattctccaagtttctctgataaatgacagagtcgtattgggagcacagaaaggtgttggttgcttctacctaatgaaggtagtgaggtcagaataggattccaggaggtaatgatcttcagctgggtctaaaataagtgttaagggtttgccagtcaaacaggtgaaggacagaaaacattcagggcagaagaatggcataaaattattcagattttattcagtaaatctcaactgagacatagacttggacatagacatgtccaacatagacatagacatggaaactgagcactgagtggatggaaggccctgcatttggctccatagtacaaggcaagatcaaagtctcaagtctttgtccctaaagccaggcaagtgaaatgtacaattgcaatatagtatgaaaattgataatgattgcagtcatacagaatcctctagaagcccagaggaacagctcaccagcctgagggggtaggaaaacctgttggtcatttctgcgttggatttctatgggaagatataatgtgacattatgggcacatgttattatgggtagatattggcatagacagtattactaagatattaacaaacattgtgctttctcctcctagatgaaaggctgcataaaagttttgaaggagcaggccccagacagtgtggaggggctgctaaatgccctcaggtgagcttcaaccctgtgtcagctcacagggaacagccagcctttcagggccattgcaaatttaaatactgttgtggatagcaccaaacttaacccttgcatattttaacacattgaatcttcctaacaatcttttgaggtcagcaccatttttatcattcccatttttaaagatggaaaaaaaatgagatttaaggaagtcaaataacttgccaaaagtcacacagtaaatggccaagctaggacctgaacccaggtgtgggtgaccccacgggtcatggacctgattctcagccacactgctttggggcttaaagagactcctcagaacaagaggcttccaggctctcactttccactttaccagtggttcccaaacctggctgcacttgaggattatgtgggtaccttttgaaaacactctgtgtgattctgactgcatgtgactcaagaccaaatgaatcggaatctctgggctagggtctcaggtatccattttgtgtttctttgtttattctaaagctccccaggtggttcacatgtgcagctaccagaattgagaacccactgtctagatgcctaaatatttggccagctgtggcatgtttcagcttctcactgctaacaagtgatgcctaggcagctgctttcttcccagggatgcatgtgcttaatccatttcagagaggggatgctttttttagctctgacacatctacaagaattggttgaatcacactgctatgtaaatcattctgatactagattgcagtccagaaggtttatggtccctgttgtcttattcatctttgagtcccctgagttccactcagtgttgtacatgcagtaagtgttcaataagtctaagtgggatggatcaataatgctctacctatgtacaatgctcatgttttatactccacttctaatcatattgtctcatttaatcatcacaagtcagagaggtaagggtgatctgttacccccacttaataaatgaagaaactgagacacacacaaaatgaacaaaatagaccctgaggttgatgctgttttgctgtgttgctaagtcatcatcctttagaagagacttagtattaatgtaagagccttccagagtctgtgggaaaaactaaggttttctcctggtgtccatttcacacccaggatgactttctatacacatgaataaggctttaacttctgagtgtgttgagctttccagcatcattcaatcaagcaaaactctgtgctaggccctgagtcccatctgatttgttagaatttgtacctcctggaggcactgtgatgatgtcagaggagcacaggctttccagatagcaaaatataggtttgaatcagaaatcacaaatctcaattcagtaaccttgtgatctggaatagatcatttaacctctctgaatcttagttttcttttctataaaatgaaggcaatgacctcacctttacaaagttattgtaacacgaaacttaacatggagcgcccatgacctggccaaagttttattacatgttaattctcttttccttcttttgcataaatgatttctacacccggctattgggaggctgcagattgcaccatttttgtgggtttgcttaccagcatttgtgcccccttgtggtggcaatgaggttaattaagcattgccaggaaagtggagaaccataaacattccagttctgggcaatgttgctatgcaaatctctattctgaaatttgtgagttagcaggggcagcctcagtggtcaggattctgcactcaatcctgtgaaatccacctccctagaaaatgagaccgctcatatctcctctgtgtaattatttgattatgtaaaatatctacttggtttaataaccataatacaaaattcctttggaaggaagaatcaaatattaaatctgagatgactgtgagcattgaagtgtggatttttgtctaaagaaataagcccaaatatcaattgtgtttccgaaggtaaagatgggctgaagcttacacagagcactgtttgccgctaacctctaccattctctctccatccaggttcactacaaagcacttgaacgatgaatcaacttccaaacagattcgagcaatgcttcagtagagctctgctcaaagaagaggatctatgtgctgacctcagaagatgtatatgtttacataatttaatacagattgatgttaatacttgtgtatttacataaccgtttccttcttgtcactgaaatatatggaccttaatttgtatcctgactgactcaacccagcagagcataaattgacttgagagccttacctttgatgtctgaaatgaaacccccttctccaaaggcaaaattcggagactttgatctttgctactggagtcctttaacaacatctataacgataaaaaattcctaattgtttgtggtagtattttaattctagatgtgttatctctctgggaagtatagtttatagaaacacaaaatatttgatttcctgtgtcggctcagctacaagaaacacaactgttatcttgacagaggaagagaggaatccaagaaaaatgcatgtggagaattaaacccaagtgtttcgaattcagcacaccccctctctgtcctcagactgcagtccacacgtgcaacttttctgtttgcacgtgttttattaatcagcatactccttttctgtttggatttatatccctctaatgttctcctttaatttcacatgaaaaaaaaatctcctgtatttttttcagttagtgggagagcagcagaaatagatagatgtgatgttgccactggactgatgaaggtggctgtcttggaactgggagacaggtcctcagaggtgcactcaggcaacaggacagccatctctctgcttcagccctctgcctacagggattagggaaatggagctctggctttgaagttatttgtgagtttagcaaccttccagttacctgcagagttctgggtgcacagccacccctcataagagccctgttctctgaagaccattcatatgagaacaaaggtctaggatactgcattagttaccagaaaactaggggaatttagagggaaaaaaaatccatgttttctatttcccaggtttttaaaaagtagctcttccccaaccccgttgctagcttgttgcaatataaaagccctggtgcacctgaatttactcctggccttactaatgattcataatgtgatcttgagaaatgtgtttaagctttctgagtcttaacctccttgtctctaaaatgggcaattaaaacaatcttcaagagccctgtaaggttaatgccgataaaatgactgactccgcccttcttccttagtacgtagtatccagcaagcatttgccccaccttgtcttgttgatgaacaatattatgaagcctgcagtcattctctctgtacatcagagcttagttcgaatggaatcatgaaaatctctgattctgacctcctaaggaaaaatgaaacccagaggatgtggtcatacaggatggctcccatgtgggcctagaacccaggatgcttcactcttgactccatgctcttccttttataccatgtggctgtgaatacatactatgggatgggattcaacccttctaagtaaatcctcagtctggtctatattgttacttgcctgtttccactagaaggagtcacccaggcatttagtgaatgataatcctagaagttgagtctgagtacatcagagttnnnnnnnnnnnnnnnnnnnnnnnnnnnnnnnnnnnnnnnnnnnnnnnnnnnnnnnnnnnnnnnnnnnnnnnnnnnnnnnnnnnnnnnnnnnnnnnnnnnnnnnnnnnnnnnagtgacaggaaagattccctggtctgcatctaaaccttagtcaacagaaggaaaaggctcttttccttggagattttcaagttgaaaaagtacagctgcttggatggagtttctctcatcagaatagaaatatgctaggtggtcttcaagaactttttgaacctacagattctaaaccttagaggaagccagaatatgtgatcataccaggtgaggaaagttaggagatattcatcttaagagatatcctatttggcagtcacatgttacacttgagcaacaattgtctaggctagaaatatagaaccacacaatatttatcatcattgggtcaatttctccccctctatcaagtgaggagattaaggcttaaagaaaggaaaggacttgccagccaccacagggctcatgaggggcttgaacccatgtcgtgtgtctctaccacagctgactctcagctggctaatggagaaaatgtgaggaattacctgtcaaattagattgagctcagagtaaatagatgagcacatttataactctaaattagactttctatcaaatgggaccaaacatatggaaggggctgctgtcctgcctcaatttagccaagacttgtcttgtctcaaagccaagactcagcagtacatggattctgagaagtccagggtctgaattgttgtctctgattactggaaggacaggttaactgaatgtctgtgatcactaacaggtgatgggctttgtgcccactccagagatattgtgggagacaaattcttttaacagcctgtcctcccggcatcaggagtcattgaacaatcatggattgttgtgtttgggattttttttttttttggctttgtttttggtttttgtgtgtgtgtgtgtgtgctgcatgcacatgcgtccaagacttatgggtggtttaggggaaagtgctagcaacagtgtcaatgtcattgttaactatatttcatatttgaggtctcattgttttcaaataaacagtgttttccatgactgagatatttatttttgggaaagcaacgaggtaaaaattatgtttctcagatgcactgctactttggcgttattactgtgttctcagaaactcgttgtgcaccactaggaattagtagtagaaaaaaaaaaacaataacaaaaaaaaaaacaactggaaatggatgtcttcacattaggggtggagtattaacaaccagaaagaaagtttggatattaccttttaactactagttaacatcatgcttgatcaacatttgctcctagttatcaccattaaattaagaccttaatggtaaactgaggttactgatgcatcatcacatttaagtaaaaataatttcatgttttccccaaagaaaaattaagcctcccaatcttaggatccaattgtgcagtagaattcagagacttctcattcaatcttgtatcctatgcagctacaaatattttttaaatgttagtaataaacattggaattttgtcttaaagagttcaaaaccttggaacccagttttctcactacgtctataaaggccattacagacccaaggctgttttgcagttttcatatgttgtttgctgaagtcattgtaattttttttgcctgctttgcctttttttctacaggagttttgagtgtgaaatgaaaattaaagtttggtacatatatttaaaaatgcacctctattttatatgatgcttagggttgagtgggtgataagcacgtgatgattcgtctacatagatacttgctagacacgtactctgagaaaatcacaccagcagcccttcacctctctacacctgaatttcttaaaaaaaaaaaaaagtcatacacaaaatgtgctactcgtggtaccacctgtcttttgttcattttgcaagagaaccctgaataacagccaaaggcaggaaattaccaaaaaaaaaaaaaaggcagaaaatgaacagagacatgattgatatctagagatgcctgagccctacttgtcgagagatgctaagaaacactaataagtgatcttttattctttcttttgagtgcagtactactttatgggtttggcaagatcagcaaataaccggttttatgttaagtatatttttcagacaatgtaagccctgaaataattcttctaactattcaactttgaggctttcctagagcattgcttttaatccctgcacttctgaagctgatcacctgagacctaattgtgtgtgctatcaatggctcagaagtcccaagagagaccttccatgatgccctgtgcaaaagacaaaagcacaattattaggattatttgtgacacaaagggaaagaaatagaaaaaggaatttttctgtaaattgacaaatggacaaatttaaagagataaaacctagaaagagagagaaggaaaaggggccttgaagagtgtgcatgtgtgtgcccctaattaaatgagtgttgagagtcaaagacatgaaaaaataaggaagggagaatatgcgtaactgtcaagagaaatacagatagtgaggaattgatggatgtgcaattcagaatagtctttataccagccagaaagttgactgttattcggggttctcttgaaaggatggggatgaggagctcagctgaccacattcatgaaacctggtgaatatttgcagtctttcttcatacctgatttcaccttttggcttatcaatgtgtagatagaatttctaggtgttttctgcttgaaaggtctatattatatttggccatcacaacttaagtgactgattaaataatactgaattgtattgatcagtttatttaagctatttatattcactaaatacaataatccatccaatacctaaatcctagtgcagactggcctaataccatgctgacctcaccttcatagtgcctcttacgtcataaataaagttctaggccattctgtctgcttctgctcagaagtcaaactctaaagaagagaggtttcctgcactggtcccgtcaggttcctgaggctatgtctttgatgctctagtgctttccttgcctatttttcttacatgaaagtctgaaaattctggaactgttggaaatggatgttctgaaaatgtgttctgcaaaatacctccatcagattgccatttgaaattgtgctatatagaattttaggtaaatctcagaatttaattttaaaagagtgtctttggagacactctttttgaaaattgacttaagaaaatcttttcttggcagggcgcagtggcttatgcctgcaatcccagcactttggaaggctgaggtgggtggatcacctgaggtcaggagttcgagaccagtctggccaacatggtgaaatcccacctctactaaaaatgcaaaaattagctgggcatggtggcatgcacctgaaatcccagctactcaggaggctgaggcaggagaatcgcttgaattcagaggacagagattgcagtgagccgagattgcgccactgcactccaatctgggtgacaagagtgaaactccatctcaaaaaaaaaaaaaaaaaaaaaaaaaggaaacagaaaaagaaaaacaaaacaaaagaaaatcttttctctatgacatcttctactttcccccatcaaatttcacactgccagattatttattttatcagcctgcattttctgtgtatttttaaatgttccttgtttgcacagtgacatgctttgtttcaagatgggagctatattttattcaccattcttaagccacccaagaggtaaagttttcagttctgtgatttgaggaacggaagttttaagaggctccctacaccttgaagaacatgcctctagaaaatatccaaagcacttgggtgaggctatcaaattgttttcttccaaatttaaatatatttgaaaaaatattccttttatatgagacaaataataaaatcactgtggggaaaggtacagtagcagtggggttccatgtgaatgtgagtggggaggataagctagactatgcatagaaatgttagggagctctggtgaactctgaaccaggtgagtgtttattatctctcagatgtgtcatgggcatttccacacctatggtgctgtcattaatgcacaccctctttttttggtctatatgaagtctacttgtatacatcaaagcccaggtcattctccacctcctttgtgaagctttccctaattatcccagcccatgctaactttccttttctgggtccctaatgcatttaagttatttgatactaaatacaggccactttatagcacttgaaattagcatttgttttttctactagattttgatttcctcagtgtgtcccttagaaggctgagctcaatataagccagtggccaagaggctgcctgccaaggggaaacttcagtgtcctgagacctgatatactaaaatcaaaccctgagaattaatttctacagctcaccaaccatccacaataacaaattatctccttccttggctggtcaattttatttcaagaggaaatatttacctacctgtcaggatgttttcaacttctgtggatacagcctacagtttgcggctgctctgccaggagtccagatgagaaatcaggctgttgtcttgatcaaaagtcagttagctagtcctggcaagggcaggaagccaacatagtagttaaattatgtcttgggacatcagtctgggacaaggctgctactttataagagagctgagtttgacacactcagaggcagaaaggcaccagaagcagagaagttcacataaccagacaaattgattcagcaccttggagagcaacctaggtgttgtgccctaacagcatagtctttacactggattctacaagccctattagttggttcaactttgtctctagaactccggttttcaaagataatatgctccttctaaaaataaagttaccaggtagctagaaacccaccttcttctttgtggaacttctgaatatcacacaaaatgggcagaaagaagtttgaaatgccgaggaatcaccttgagtgttcatatttatggtgttttcagatttaagccaaacttacaggcatgactcttccttcttctttagtcccacacctcttagtcatacatattttttcaaaacagctctcaaaatatagcaacttctccctagtttgttttgctttattttctcaaaccatcatcatctccctagatcacccagccttttctgttgctgctgcaattttttctccacacagccaacactcattttgttgacatgtatctgaccatgctgatgtctttagaaagtttcctgaaatatattttcagagttgttaattggttttcaatgtgtggggtgagaggaagatgtcaattttcaaatatttgtgaaacaagattaaagacattattttattattgtttttactaccggattttttttatatattgcaaatctccatgggagggtataccgtatgatacatatcaattctcaagtttatttgtctaaagactcttgtgtatttcacaaaacatctataatttctcatggacattagcattctgcaaaaacattactaagtcaaacccaatagcttgagatacaaggccttctatgagataaactgcttaattctcccatctcacttaccttctatcaaacacgcatcccattttcccatgctacaaaactggttacagttttctaacatatcatcaattttttcatagttatatgttgctaataatgcttccccttctgcctgaaattcgacttcctttcatctgccttataaaattatattcattcttcaaggcactgctcaaatgtttctccctctttggacctttctgtgtcctatcccaaaaaaattatgaactcttttctgtggttctcatccctctcctctctttctctctctgtctctctctttctctctctctttctcttgatctgcctatatacacacatacacaatacatatactttaatatatatgcagttttatatataatctatataaaatatggtatttaatattatattaaagatgagtgagatagaaataaacacataaagagacaaacataaatgaaaacatgttatatatggatgttcatcataatatttttcacttatgtgtttacttatgctttcttcactgaacaatggattccttaaaggcagtgactatgtctaatttctctcttaacctctctattcacataatctaatgaaatgcatagcattcaatgtctgctaagggcatgttcaaatgaattcactcatctcgcttatagctgaagtccaggccatcccaccactcaagatgaacttgtgtgcttttgcacaaatgcagttctgcctgctgatctccctctggtgggagcttcactttgccaaggacactggtccagaaccactatgtaagattcaaaatagatatcatggtaatggatatagtctggctcttgctctactctccaagccatgattctggcatggactgtgctatcctggaagaagaagcttctttttgtgttctcacaaagcatgcatgaatgatgacagccatgcaccaggccatccagaaactattggttccctgttactcctgttagtgtatttggtactgccagtgtactctgctactctcacctaaataaatctccccaggatctgtgaataagatgctgataggattttccaacaggaacatttccccaagatgttcatgctagagcaggtctcagatatgggttattattcaatgacacatttgggcaagggagaataacaaaacctaatcacaaatgttcatcactgatctctatggtaattgtcaaatttaaagatggaggcaagggtgaactgcctttaatgctgaaagctgcctgtgccacactaaagttcttgtagtgccagaatggatacatcaccacagaacctgatatatcacagaattgtagtccaatgcaatcatacaatatggagacagagacctgattaccaggtgacatagcatttgggctggttggcctaagaaggtagagattgtcctcaataaggtggagaaatgtaaatacactagtatataagatgataggcttccactacagaaagtgaacttatttagagaatagctctccttgctgagttgtgaaaccagctatcttcaaagttcctgggtcaacaaccgtgaatgcctaggcactgagtaagatgatggaggattagccactggaccaggggagtgataactaaaaccactttcaggattgatcccatccactggcctacagtaaaaagcttcaggcttgatataagtgaagtgtagaaaaatatctttaaaacaaataatggtttcccataatatgccattattttaaaacttttaatattttgacatcttttatttattatcattattgtttacatggaataaaaaattcttatttttatgaaaatagattcaaactgtatataattatgtgaattatgtgtcttgacttttaatttaaaatatataatgaacacctttctaggccagtgtgtgtatgcatatgagagtggggcaggtgtatacattagcacatatatatatacaattatacataaaatttgttttttatataattaatccaatttattttcacttactttttaaacagatttattgaggctcaattgacaaacagtagactgaacctattgaatgcatacatttgtgagttttgacatgtatgcacactcacacttaatgtgaaaccataaccacactacacactacaataaatgtgttcattatcctgtttccttatgcccttcttaatcttcctctcctattccagcccctgccattctcaaacaaccactggtctgcttgatgtcattataagtacatttttatttcctagaattgttgtaagtagaatagtataatacttatgcttttctgtttcattttgttcactcatcataaacgctgtttttttgtttgtttgtttttgttttgttttgttttgttttttgagattgagagttttgctctcatcacccaggctggagtgcagtggcatgatctcagctcattgcaacctccacctcccgggttcaagaaactctcctgcctcagcctcctgagctgggattacaggcatgggacactacgccactacgcctggctaatttttgtatttttagtagagatggtgtttcaccatgttggccaggctggtctcaaactcctgacctcaagtgatctgccagcctcagccttccaaagtgctgggattacaggcgtgagccactgcacccggatatgaacgcttttaaatttatcccatgttgttgcatgtatcaataggttgttcctttttattgttgactgttattctattgcatgcttgtaacacagtttttttacacattcatacatttaaattatttggctatcacaaattaagatattataaacatccatttgtaagttttatatggacatatgctctatttacttaggagtactgtggctggaccatatggcaaaaatatttaaagttcttgaaaaactataaaattgcttttcaaaatgactgtatcattttaaattcccacaagcagtgtatgagtgcttcagttgccgacaaagcctcaccaacaattggtataaccaccctttttaaatttagcctttctaataagtaggagtaatatcttattgtggttttaatttgcatttcgctgaagactaatggtgtttagagtatattcatgtactttatttgctattcatatgtcttgtttgtttgtttggtaaagagacggttcgtatcttctgcttttgttattgtcttcattgttttcttattattgggttttgagacttatttatgtgtaatgaatacaagtcctttatcagatacaagattttcaaatattttctcatagtctgtggttgtcatttcattatctttacagtagctttagaaaatcagtacttgttgattctgatgaagtccaatttatcaactctttttctcttctattgcacttttggagttgtatctaaaaaattctgtctaacccaatgtcacaaacataatctcctaagttttcttctaaaagatttaacgtttcaggttttacatttaggtccataatcaatttgtgttagtgtttgtctatttgtgtctatggtgttagggatggtttgaatttcattatttgcataaggattccagtagttcttatgtaactgctgaagactgtcctttctccactgaatggcctttgcatctttgtcaaatataaattgactgtatatgtgtggatctaattccagatcctagttagttccattgatctgtataacttaataacttagcgtaaatactacactgtcttgattaatgtagcttgataataaatcttgaactcagataatggaaatcctccaatttttttcattttcaaattaattttggctgttctggatgctctcaattcctttatgaattttagaattaccttgtcaattcctaccaaaaaattatcccgttgagacttttattgaggatccttagactatatatatattaatttggggaaaatagacatataaaccatattgtgttttctgatccataaaaaaatagtagtaaatctctccatttgtttaggtctttaattttgtaagatgctctgcatagataatctttgaatactttttcttcatcagttagaatcccttttatttatttactttttaacttataatgctaactaaaatctttagcacaatgtcgaatagatgttgcaagagtggacattcctatctagttcctgatcttagggagattcattcagtctttcatcttaggaatgacgttaattgtaggttttatgtagatgcgctttatcaacttgagaaatttcctttttattttgctaagtacttatcaggaatgcatcctggattgtgtcaaatatttttatgaatctatgaaaatggccatattattttttctttttaaatctatttaatattaatatggtgaattatattaattgacttttgaatgttaaaccaaacttgcattactgaggttaaccctacttagttataatttattaccttttttatacattttaatatttgattttcttaaaatctgttaataatttttgcatctgtttataaggaatattggtctgcagtttcttatcttgtaatgttggtctggttttggtatcagagtagaactggcctcatagaatgagttagaaaatttttcatcctcttcaattttctggaagatttgagtaacagtcacccttcttcaaactttttaaacttgaactcttaatcattttgtattagcttaaatatcactttcttgggacatctcatcaggaattcttagatttttttacatccttcctaggtatgtgttaccatgatccactatattttttctttcattaatgcacatgccatctataagtgctttattattattaattttccctgccagactttaaacttcatgaagtcagggtccttttctgcgttgctcactgcctaatcaccattgtctaataatacccagcccatagtaaggctggaaaatttcatagttaagtaaattaataattttttgaccaaacactcttaagtatttaatgggaagatcattttttcctgtgaaataaaatgtaatcaagaacaaaattatactagtttctagtttcttaatatatacaattcatatgtcctgaaattaattctatatagtcatactgtacaatgttttatagtatagtggtgtatacttctgggttccccttggtttagttttattcagtaattttatcagtattaatattaatactagcacattatatatgtgtgcacatgtgcaggttcacaatctttgttacagagtttaaaagaatcagagatttattttctatccactctagaataaaaaaactatagaatatatgttgtttgaaaaatctgaaacaagaaaccctctcaaccccatttttttaggggaggaattctcagtcaatattctcaatttcttctgcatttgtgacccttgttcatgtagtctacatatttcttttgatttttagttatttgtatttttatagaaaatgatacattttatccacgtttaaaaatatttagtaaaaacttttacacttttttcaatctttttagttattttctttttacttgtagttatattcagttccttggaactaattttttttgaatttttgttttttgttttatttaccttgattagacaaatacagtatttatctatttgtgtgtatgcatttgtgcactcatggttgtatgtgtgtgtgttgtaataagtagctattggacaatagtaaatggtttgagagagaaagcgaggttctaaatgcagacaacctaggtttttatttaagtttcatgacttattaaatgtacactcttgggcaactttatttgtacctcaatttaatggactgttaatgtggactgttgggctgttaattataaaaatgtaataagggtcttgtatatagtaaccaatcaataattatttgttataattatcaatgtatctattgtagtaatttttatctttattttctaccatcttaaacatttctactcttattaactttcttatttcttatttttataacttattttgtggactatttcatgtttttttctctgtttatgggaaatctctttcaggaaatgcaaagaaacttcaaagaaagctgggaaactgaaaag

SEQ ID NO: 3122 - DNA, 2934 bp, Homo sapiens
  misc_feature (1)...(2934): n = A, C, G, or T/U
ggcgtactcggcggcggcggagcgggcggcagagcagggcggcggcgactcgcagggtaccaccatcttaaggacagaaaagctacaggactctaggaggccaccgtcctgatttgggaagtccaacttactttggccagacagcagctaagctggttcatcccatcagcctggattggtgaaactgaatcacaggagatatttccaggtttgctgggatgggaaacctgctcaaagtccttaccagggaaattgaaaactatccacactttttcctggattttgaaaatgctcagcctacagaaggagagagagaaatctggaaccagatcagcgccgtccttcaggattctgagagcatccttgcagacctgcaggcttacaaaggcgcaggcccagagatccgagatgcaattcaaaatcccaatgacattcagcttcaagaaaaagcttggaatgcggtgtgccctcttgttgtgaggctaaagagattttacgagttttccattagactagaaaaagctcttcagagtttattggaatctctgacttgtccaccctacacaccaacccaacacctggaaagggaacaggccctggcaaaggagtttgccgaaattttacattttacccttcgattcgatgagctgaagatgaggaacccggctattcagaatgacttcagctactacagaagaacaatcagtcgcaaccgcatcaacaacatgcacctagacattgagaatgaagtcaataatgagatggccaatcgaatgtccctcttctatgcagaagccacgccaatgctgaaaacccttagcaatgccacaatgcactttgtctctgaaaacaaaactctgccaatagagaacaccacagactgcctcagcacaatgacaagtgtctgtaaagtcatgctggaaactccggagtacagaagtaggtttacgagtgaagagaccctgatgttctgcatgagggtgatggtgggagtcatcatcctctatgaccatgtccaccctgtgggagctttctgcaagacatccaagatcgatatgaaaggctgcataaaagttttgaaggagcaggccccagacagtgtggaggggctgctaaatgccctcaggttcactacaaagcacttgaacgatgaatcaacttccaaacagattcgagcaatgcttcagtagagctctgctcaaagaagaggatctatgtgctgacctcagaagatgtatatgtttacataatttaatacagattgatgttaatacttgtgtatttacataaccgtttccttcttgtcactgaaatatatggaccttaatttgtatcctgactgactcaacccagcagagcataaattgacttgagagccttacctttgatgtctgaaatgaaacccccttctccaaaggcaaaattcggagactttgatctttgctactggagtcctttaacaacatctataacgataaaaaattcctaattgtttgtggtagtattttaattctagatgtgttatctctctgggaagtatagtttatagaaacacaaaatatttgatttcctgtgtcggctcagctacaagaaacacaactgttatcttgacagaggaagagaggaatccaagaaaaatgcatgtggagaattaaacccaagtgtttcgaattcagcacaccccctctctgtcctcagactgcagtccacacgtgcaacttttctgtttgcacgtgttttattaatcagcatactccttttctgtttggatttatatccctctaatgttctcctttaatttcacatgaaaaaaaaatctcctgtatttttttcagttagtgggagagcagcagaaatagatagatgtgatgttgccactggactgatgaaggtggctgtcttggaactgggagacaggtcctcagaggtgcactcaggcaacaggacagccatctctctgcttcagccctctgcctacagggattagggaaatggagctctggctttgaagttatttgtgagtttagcaaccttccagttacctgcagagttctgggtgcacagccacccctcataagagccctgttctctgaagaccattcatatgagaacaaaggtctaggatactgcattagttaccagaaaactaggggaatttagagggaaaaaaaatccatgttttctatttcccaggtttttaaaaagtagctcttccccaaccccgttgctagcttgttgcaatataaaagccctggtgcacctgaatttactcctggccttactaatgattcataatgtgatcttgagaaatgtgtttaagctttctgagtcttaacctccttgtctctaaaatgggcaattaaaacaatcttcaagagccctgtaaggttaatgccgataaaatgactgactccgcccttcttccttagtacgtagtatccagcaagcatttgccccaccttgtcttgttgatgaacaatattatgaagcctgcagtcattctctctgtacatcagagcttagttcgaatggaatcatgaaaatctctgattctgacctcctaaggaaaaatgaaacccagaggatgtggtcatacaggatggctcccatgtgggcctagaacccaggatgcttcactcttgactccatgctcttccttttataccatgtggctgtgaatacatactatgggatgggattcaacccttctaagtaaatcctcagtctggtctatattgttacttgcctgtttccactagaaggagtcacccaggcatttagtgaatgataatcctagaagttgagtctgagtacatcagagttnnnnnnnnnnnnnnnnnnnnnnnnnnnnnnnnnnnnnnnnnnnnnnnnnnnnnnnnnnnnnnnnnnnnnnnnnnnnnnnnnnnnnnnnnnnnnnnnnnnnnnnnnnnnnnn

SEQ ID NO: 3123 - protein, 321 aa, Homo sapiens
MGNLLKVLTREIENYPHFFLDFENAQPTEGEREIWNQISAVLQDSESILADLQAYKGAGPEIRDAIQNPNDIQLQEKAWNAVCPLVVRLKRFYEFSIRLEKALQSLLESLTCPPYTPTQHLEREQAKEFAEILHFTLRFDELKMRNPAIQNDFSYYRRTISRNRINNMHLDIENEVNNEMANRMSLFYAEATPMLKTLSNATMHFVSENKTLPIENTTDCLSTMTSVCKVMLETPEYRSRFTSEETLMFCMRVMVGVIILYDHVHPVGAFCKTSKIDMKGCIKVLKEQAPDSVEGLLNALRFTTKHLNDESTSKQIRAMLQ

SEQ ID NO: 3124 - DNA, 4677 bp, Homo sapiens
  misc_feature (1)...(4677): n = A, C, G, or T/U
ctcggcggcggcggagcgggcggcagagcagggcggcggcgactcgctctttttcagctagataccttgacttttctgaaaaactaaaaccagaagcatttcacgaagctaagcacaggacagaaggtttgctgggatgggaaacctgctcaaagtccttaccagggaaattgaaaactatccacactttttcctggattttgaaaatgctcagcctacagaaggagagagagaaatctggaaccagatcagcgccgtccttcaggattctgagagcatccttgcagacctgcaggcttacaaaggcgcaggcccagagatccgagatgcaattcaaaatcccaatgacattcagcttcaagaaaaagcttggaatgcggtgtgccctcttgttgtgaggctaaagagattttacgagttttccattagactagaaaaagctcttcagagtttattggaatctctgacttgtccaccctacacaccaacccaacacctggaaagggaacaggccctggcaaaggagtttgccgaaattttacattttacccttcgattcgatgagctgaagatgaggaacccggctattcagaatgacttcagctactacagaagaacaatcagtcgcaaccgcatcaacaacatgcacgcagagcacagacagaagacaatgtccttgtctgtaattcagttccagagaaaagtatttggaggatttggactttctctttataaatccatcttctcttcttattttcatcagctagacattgagaatgaagtcaataatgagatggccaatcgaatgtccctcttctatgcagaagccacgccaatgctgaaaacccttagcaatgccacaatgcactttgtctctgaaaacaaaactctgccaatagagaacaccacagactgcctcagcacaatgacaagtgtctgtaaagtcatgctggaaactccggagtacagaagtaggtttacgagtgaagagaccctgatgttctgcatgagggtgatggtgggagtcatcatcctctatgaccatgtccaccctgtgggagctttctgcaagacatccaagatcgatatgaaaggctgcataaaagttttgaaggagcaggccccagacagtgtggaggggctgctaaatgccctcaggttcactacaaagcacttgaacgatgaatcaacttccaaacagattcgagcaatgcttcagtagagctctgctcaaagaagaggatctatgtgctgacctcagaagatgtatatgtttacataatttaatacagattgatgttaatacttgtgtatttacataaccgtttccttcttgtcactgaaatatatggaccttaatttgtatcctgactgactcaacccagcagagcataaattgacttgagagccttacctttgatgtctgaaatgaaacccccttctccaaaggcaaaattcggagactttgatctttgctactggagtcctttaacaacatctataacgataaaaaattcctaattgtttgtggtagtattttaattctagatgtgttatctctctgggaagtatagtttatagaaacacaaaatatttgatttcctgtgtcggctcagctacaagaaacacaactgttatcttgacagaggaagagaggaatccaagaaaaatgcatgtggagaattaaacccaagtgtttcgaattcagcacaccccctctctgtcctcagactgcagtccacacgtgcaacttttctgtttgcacgtgttttattaatcagcatactccttttctgtttggatttatatccctctaatgttctcctttaatttcacatgaaaaaaaaatctcctgtatttttttcagttagtgggagagcagcagaaatagatagatgtgatgttgccactggactgatgaaggtggctgtcttggaactgggagacaggtcctcagaggtgcactcaggcaacaggacagccatctctctgcttcagccctctgcctacagggattagggaaatggagctctggctttgaagttatttgtgagtttagcaaccttccagttacctgcagagttctgggtgcacagccacccctcataagagccctgttctctgaagaccattcatatgagaacaaaggtctaggatactgcattagttaccagaaaactaggggaatttagagggaaaaaaaatccatgttttctatttcccaggtttttaaaaagtagctcttccccaaccccgttgctagcttgttgcaatataaaagccctggtgcacctgaatttactcctggccttactaatgattcataatgtgatcttgagaaatgtgtttaagctttctgagtcttaacctccttgtctctaaaatgggcaattaaaacaatcttcaagagccctgtaaggttaatgccgataaaatgactgactccgcccttcttccttagtacgtagtatccagcaagcatttgccccaccttgtcttgttgatgaacaatattatgaagcctgcagtcattctctctgtacatcagagcttagttcgaatggaatcatgaaaatctctgattctgacctcctaaggaaaaatgaaacccagaggatgtggtcatacaggatggctcccatgtgggcctagaacccaggatgcttcactcttgactccatgctcttccttttataccatgtggctgtgaatacatactatgggatgggattcaacccttctaagtaaatcctcagtctggtctatattgttacttgcctgtttccactagaaggagtcacccaggcatttagtgaatgataatcctagaagttgagtctgagtacatcagagttnnnnnnnnnnnnnnnnnnnnnnnnnnnnnnnnnnnnnnnnnnnnnnnnnnnnnnnnnnnnnnnnnnnnnnnnnnnnnnnnnnnnnnnnnnnnnnnnnnnnnnnnnnnnnnnaaatatgctaggtggtcttcaagaactttttgaacctacagattctaaaccttagaggaagccagaatatgtgatcataccaggtgaggaaagttaggagatattcatcttaagagatatcctatttggcagtcacatgttacacttgagcaacaattgtctaggctagaaatatagaaccacacaatatttatcatcattgggtcaatttctccccctctatcaagtgaggagattaaggcttaaagaaaggaaaggacttgccagccaccacagggctcatgaggggcttgaacccatgtcgtgtgtctctaccacagctgactctcagctggctaatggagaaaatgtgaggaattacctgtcaaattagattgagctcagagtaaatagatgagcacatttataactctaaattagactttctatcaaatgggaccaaacatatggaaggggctgctgtcctgcctcaatttagccaagacttgtcttgtctcaaagccaagactcagcagtacatggattctgagaagtccagggtctgaattgttgtctctgattactggaaggacaggttaactgaatgtctgtgatcactaacaggtgatgggctttgtgcccactccagagatattgtgggagacaaattcttttaacagcctgtcctcccggcatcaggagtcattgaacaatcatggattgttgtgtttgggattttttttttttttggctttgtttttggtttttgtgtgtgtgtgtgtgtgctgcatgcacatgcgtccaagacttatgggtggtttaggggaaagtgctagcaacagtgtcaatgtcattgttaactatatttcatatttgaggtctcattgttttcaaataaacagtgttttccatgactgagatatttatttttgggaaagcaacgaggtaaaaattatgtttctcagatgcactgctactttggcgttattactgtgttctcagaaactcgttgtgcaccactaggaattagtagtagaaaaaaaaaaacaataacaaaaaaaaaaacaactggaaatggatgtcttcacattaggggtggagtattaacaaccagaaagaaagtttggatattaccttttaactactagttaacatcatgcttgatcaacatttgctcctagttatcaccattaaattaagaccttaatggtaaactgaggttactgatgcatcatcacatttaagtaaaaataatttcatgttttccccaaagaaaaattaagcctcccaatcttaggatccaattgtgcagtagaattcagagacttctcattcaatcttgtatcctatgcagctacaaatattttttaaatgttagtaataaacattggaattttgtcttaaagagttcaaaaccttggaacccagttttctcactacgtctataaaggccattacagacccaaggctgttttgcagttttcatatgttgtttgctgaagtcattgtaattttttttgcctgctttgcctttttttctacaggagttttgagtgtgaaatgaaaattaaagtttggtacatatatttaaaaatgcacctctattttatatgatgcttagggttgagtgggtgataagcacgtgatgattcgtctacatagatacttgctagacacgtactctgagaaaatcacaccagcagcccttcacctctctacacctgaatttctt

SEQ ID NO: 3125 - protein, 359 aa, Homo sapiens
MGNLLKVLTREIENYPHFFLDFENAQPTEGEREIWNQISAVLQDSESILADLQAYKGAGPEIRDAIQNPNDIQLQEKAWNAVCPLVVRLKRFYEFSIRLEKALQSLLESLTCPPYTPTQHLEREQAKEFAEILHFTLRFDELKMRNPAIQNDFSYYRRTISRNRINNMHAEHRQKTMSLSVIQFQRKVFGGFGLSLYKSIFSSYFHQLDIENEVNNEMANRMSLFYAEATPMLKTLSNATMHFVSENKTLPIENTTDCLSTMTSVCKVMLETPEYRSRFTSEETLMFCMRVMVGVIILYDHVHPVGAFCKTSKIDMKGCIKVLKEQAPDSVEGLLNALRFTTKHLNDESTSKQIRAMLQ

SEQ ID NO: 3126 - DNA, 4645 bp, Homo sapiens
  misc_feature (1)...(4645): n = A, C, G, or T/U
ggcgtactcggcggcggcggagcgggcggcagagcagggcggcggcgactcgcagggtaccaccatcttaaggacagaaaagctacaggactctaggaggccaccgtcctgatttgggaagtccaacttactttggccagacagcagctaagctggttcatcccatcagcctggattggtgaaactgaatcacaggagatatttccaggtttgctgggatgggaaacctgctcaaagtccttaccagggaaattgaaaactatccacactttttcctggattttgaaaatgctcagcctacagaaggagagagagaaatctggaaccagatcagcgccgtccttcaggattctgagagcatccttgcagacctgcaggcttacaaaggcgcaggcccagagatccgagatgcaattcaaaatcccaatgacattcagcttcaagaaaaagcttggaatgcggtgtgccctcttgttgtgaggctaaagagattttacgagttttccattagactagaaaaagctcttcagagtttattggaatctctgacttgtccaccctacacaccaacccaacacctggaaagggaacaggccctggcaaaggagtttgccgaaattttacattttacccttcgattcgatgagctgaagatgaggaacccggctattcagaatgacttcagctactacagaagaacaatcagtcgcaaccgcatcaacaacatgcacctagacattgagaatgaagtcaataatgagatggccaatcgaatgtccctcttctatgcagaagccacgccaatgctgaaaacccttagcaatgccacaatgcactttgtctctgaaaacaaaactctgccaatagagaacaccacagactgcctcagcacaatgacaagtgtctgtaaagtcatgctggaaactccggagtacagaagtaggtttacgagtgaagagaccctgatgttctgcatgagggtgatggtgggagtcatcatcctctatgaccatgtccaccctgtgggagctttctgcaagacatccaagatcgatatgaaaggctgcataaaagttttgaaggagcaggccccagacagtgtggaggggctgctaaatgccctcaggttcactacaaagcacttgaacgatgaatcaacttccaaacagattcgagcaatgcttcagtagagctctgctcaaagaagaggatctatgtgctgacctcagaagatgtatatgtttacataatttaatacagattgatgttaatacttgtgtatttacataaccgtttccttcttgtcactgaaatatatggaccttaatttgtatcctgactgactcaacccagcagagcataaattgacttgagagccttacctttgatgtctgaaatgaaacccccttctccaaaggcaaaattcggagactttgatctttgctactggagtcctttaacaacatctataacgataaaaaattcctaattgtttgtggtagtattttaattctagatgtgttatctctctgggaagtatagtttatagaaacacaaaatatttgatttcctgtgtcggctcagctacaagaaacacaactgttatcttgacagaggaagagaggaatccaagaaaaatgcatgtggagaattaaacccaagtgtttcgaattcagcacaccccctctctgtcctcagactgcagtccacacgtgcaacttttctgtttgcacgtgttttattaatcagcatactccttttctgtttggatttatatccctctaatgttctcctttaatttcacatgaaaaaaaaatctcctgtatttttttcagttagtgggagagcagcagaaatagatagatgtgatgttgccactggactgatgaaggtggctgtcttggaactgggagacaggtcctcagaggtgcactcaggcaacaggacagccatctctctgcttcagccctctgcctacagggattagggaaatggagctctggctttgaagttatttgtgagtttagcaaccttccagttacctgcagagttctgggtgcacagccacccctcataagagccctgttctctgaagaccattcatatgagaacaaaggtctaggatactgcattagttaccagaaaactaggggaatttagagggaaaaaaaatccatgttttctatttcccaggtttttaaaaagtagctcttccccaaccccgttgctagcttgttgcaatataaaagccctggtgcacctgaatttactcctggccttactaatgattcataatgtgatcttgagaaatgtgtttaagctttctgagtcttaacctccttgtctctaaaatgggcaattaaaacaatcttcaagagccctgtaaggttaatgccgataaaatgactgactccgcccttcttccttagtacgtagtatccagcaagcatttgccccaccttgtcttgttgatgaacaatattatgaagcctgcagtcattctctctgtacatcagagcttagttcgaatggaatcatgaaaatctctgattctgacctcctaaggaaaaatgaaacccagaggatgtggtcatacaggatggctcccatgtgggcctagaacccaggatgcttcactcttgactccatgctcttccttttataccatgtggctgtgaatacatactatgggatgggattcaacccttctaagtaaatcctcagtctggtctatattgttacttgcctgtttccactagaaggagtcacccaggcatttagtgaatgataatcctagaagttgagtctgagtacatcagagttnnnnnnnnnnnnnnnnnnnnnnnnnnnnnnnnnnnnnnnnnnnnnnnnnnnnnnnnnnnnnnnnnnnnnnnnnnnnnnnnnnnnnnnnnnnnnnnnnnnnnnnnnnnnnnnaaatatgctaggtggtcttcaagaactttttgaacctacagattctaaaccttagaggaagccagaatatgtgatcataccaggtgaggaaagttaggagatattcatcttaagagatatcctatttggcagtcacatgttacacttgagcaacaattgtctaggctagaaatatagaaccacacaatatttatcatcattgggtcaatttctccccctctatcaagtgaggagattaaggcttaaagaaaggaaaggacttgccagccaccacagggctcatgaggggcttgaacccatgtcgtgtgtctctaccacagctgactctcagctggctaatggagaaaatgtgaggaattacctgtcaaattagattgagctcagagtaaatagatgagcacatttataactctaaattagactttctatcaaatgggaccaaacatatggaaggggctgctgtcctgcctcaatttagccaagacttgtcttgtctcaaagccaagactcagcagtacatggattctgagaagtccagggtctgaattgttgtctctgattactggaaggacaggttaactgaatgtctgtgatcactaacaggtgatgggctttgtgcccactccagagatattgtgggagacaaattcttttaacagcctgtcctcccggcatcaggagtcattgaacaatcatggattgttgtgtttgggattttttttttttttggctttgtttttggtttttgtgtgtgtgtgtgtgtgctgcatgcacatgcgtccaagacttatgggtggtttaggggaaagtgctagcaacagtgtcaatgtcattgttaactatatttcatatttgaggtctcattgttttcaaataaacagtgttttccatgactgagatatttatttttgggaaagcaacgaggtaaaaattatgtttctcagatgcactgctactttggcgttattactgtgttctcagaaactcgttgtgcaccactaggaattagtagtagaaaaaaaaaaacaataacaaaaaaaaaaacaactggaaatggatgtcttcacattaggggtggagtattaacaaccagaaagaaagtttggatattaccttttaactactagttaacatcatgcttgatcaacatttgctcctagttatcaccattaaattaagaccttaatggtaaactgaggttactgatgcatcatcacatttaagtaaaaataatttcatgttttccccaaagaaaaattaagcctcccaatcttaggatccaattgtgcagtagaattcagagacttctcattcaatcttgtatcctatgcagctacaaatattttttaaatgttagtaataaacattggaattttgtcttaaagagttcaaaaccttggaacccagttttctcactacgtctataaaggccattacagacccaaggctgttttgcagttttcatatgttgtttgctgaagtcattgtaattttttttgcctgctttgcctttttttctacaggagttttgagtgtgaaatgaaaattaaagtttggtacatatatttaaaaatgcacctctattttatatgatgcttagggttgagtgggtgataagcacgtgatgattcgtctacatagatacttgctagacacgtactctgagaaaatcacaccagcagcccttcacctctctacacctgaatttctt

SEQ ID NO: 3127 - protein, 321 aa, Homo sapiens; identical to SEQ ID NO: 3123

SEQ ID NO: 3128 - DNA, 121835 bp, Mus musculus
  misc_feature (1)...(121835): n = A, C, G, or T/U
tgttgctctaggcaggaatctggaccttagtatctccagatagacctgtcttcaggatataggctatcctggatgcaggtggaccttaggctaagtagccttttccactagaagacaaggaagaaccaagaaccatatgtccccaaagctcagaccagctgagaaagtgaggttacggctatggtgggcacccagggggttcatcatagcagctgtgacacagtgaggacacacaggagcgtatcctcagggaccgcttggatgtgtgggagctgcatactctcatcagccatcactctccactgtgctctacccctgcccctggcacccaagcatctgctgagcctccatggacttgtgagtcatacctctgctctgtgcaccaaagcctgctgcggagatgcctgactctccatgggtcagaggtctggggactgggtcgtctgtcaatcaaagcagctctgcttggcttctctatgccttctgtgtgctcttccctaccccaccccccatcacccacacccgagatgctaaggattctgacttttgtttccctcctcatttgtctgatatgctagcctcagtcaggcccaaaagtccccagatatcattttttacatctttcctataagtgactgtccctgcctccttttcttggtcctttcttattttaagcatcatgcatggagacttctctgttcctaattaaatgtcctgtgacattttacttccttccgagtcacatttctcctttccttgaggttcagcattatccagaaatgtggccttacagggatgccaacagtatcacctctgcctaggtagaaggatgtctccccagtgattgctttcccagaaactttgacattcagatgacctgggtgtggccaaataccgaaatccagacttgctaataaaggaaaacacatgggagaatattcttgttacattaagaattattctattattttatgtgtatgtaggcatgcctgagtgtatatatgtgtacaacacacatgcagggtcccatagaagggcaggtaaggaagagtggcaggcaagcatggtggtagaaacatgaagttagctgatcacattttcatccacaagcagaaagtgggggaaggggaaaagaacaggatgtagagcgaagctatcaaccctcaaatctgcccctactgacatacttcctccatcaaggctccacctcctccacagccttcccaaacattgccagcaactggggatcaaatgttcaaatggtgagcctatagggacatttctcactcagacaagcacgggaaccttaaaccatttgtaatgaagtaagtaccatgatgtacaaagataactagcaacacgtttcagacttgtagcagtctccttccatattgtcttcaaggtctgcccatagatgttcacattcatctactgatctgaactgcaggctctagaagtctgtggtttcaatgtaactggctttatttcaacattagttccttcaggggtgcagtaacattctggcactgggccttggggcttttgcaattttttttcccctcagattctctaactagaagcacaaatgaggaaccggcctctaaatctctcctagatgtggtcaagtgagtctggaattcatgcttcttattacaacatagagtatacccttgcccagggccaacctagacctgagctgagggtgggaaattctaccatattattgtttgctttgctctttctagccacaaatgagaatctcttttgtggagggggatttttgttgttattgttgttgtggttgttttgttttgggaatttttgtttgtttgttattgagacagggtttctctgtgtagctctggctttcctagaactctctctgtagaccaggctggccttaaactcacagagatctccctacctctatttctgtaatgctgggattaaaggctcatactctcaccaccatgcatagctgagtatcttgaatgtgtttattacccacttgcacttttgttttcttctgtgaaattccttttttgtttcataagaggctttttaagctgcatcctctgatacttatgacagtggatccccacaggccaagcgaagcagggggaaatctacttagatgtctgtattccagggcctacctcccacttaacatttattatttatgatttgagataaatgccttcctctctgatgtttccaacttattcattcgtgtagcacacagttcagtaggctttagtggatatacaatgaatcactacctgatttgaagaagaaatcctgtgcccatcagctcttcctctactgttggcccctgcagacaggaatctactgtcaggctctgtagattgtcttttttttgagcattatatagaggtgaaccatacagtacatctctctctctctctctctctctctctctctctctctctctctctctctctctctgtgtgtgtgtgtgtgtgtgtgtgtgtgtgtttgtgtgttttcaagacagggtttctctgtgtagccctggctgtcctggaactcactctgtagaccaggctggcctcaaagttagagattctcctgcttctgcctcctaagtgctaggattaaaaacatgtgccacaactgcctggctacatggccctttgtatctgactgctttcacttgtcataatggtttcagattcaacatctcagagcatgtagcagtacctcatttctctctttggtcaattggtgatcctttcttcatagacaacactttgttaacacatttattagcagatagaattggtatatttttagtgaaccctcttctgaattgtatacacattctactattactgaatcctgcccccatacacagtggacctactcctttggtcatattgtgacctgtttgcttaagtttttgaaccattaaactgttctgcacaaccaaccaacactgtgttgtattgtcactggtggtagtttccagtcttcatcttctcagccgcctagctccttatctttatggtcctagccatcctgttaggcacagaaaattcacctttatattctttgaagttttaaaattttaaactctattattattattattattactgcttgtgttttggctttctttatttattttgagacaaagtcttctgtagctcaggctgtcttcagaatccttgtgtagccaaggattatctagaactcctgatggttcctgcctccacctcctgggtgccggtgtcacaggtgtatgccactgaatctagcttctccttgagtctctgatttatgttttccagatgtgccatggtgttgaagtttcttgccattacatattggtcatttatataataagagattattgtttaatccaaagtcatgaactccatgacttatatctacttctaggagttttataggtcattgatccagtttgagtaacttttgtatagggtatgaggtaggggcctaaatttattcttttttctgtttgtttgtttgctcaattactagatatatttttgagacaggtctcatgcagtccagacttgcctaaacttgctgtgtagctgaggatgaccttgaacctctgatccacttgtttctcctgctgagtgctaggattacagatatgtgccaccatgccaagcttccagctttacctgtctctctggttttccaggtgtcccagcggcatttgttgaaaacactgttctttctcctgttgaattatcatcatagtcttgccaagagtcacttgacaatgtgtgaggatttatttctggactttcagttttattctgtccatccagatggtgattttgatgccaggaccacactgccttgattactgtagctttgtagtgatgacattgctcttccatatggaaactagaaagcccatttacccattgccctggaggaatatgtgacaagtggttcttaatgagacgtctctggacctacagcatcgacatcatctagaccaggggttttcaacctgtgggtctccacccccaagagaggccacatatcagatatgtacaattcataacagtagcaaaattatagctaggaaatagcaacaaaataattttgtctgcagaactgtattaaagggtcacagcatcaggttgagaatccttgatctagacacttgtcagaaatgcactttttcaggcagtgcctgagacttgcttcactaaaaaccctggtcctgtggcccattagtcagcatcctaacaggtcctttaaggattctgctgggtgctgaagcctgggtttcattgcactgaatctactgtcctgctgtccactgggccaaccacaaacaaatggttattgattggccactggggctgtggtcaatgcaaatacactcaatttcaaagttaatatggaaagggaatacaaaataccttgttcatgattttcacattgattttcacagacatataggattaagtaaaacacaccattaaaattgatctcaggagctgggagatggctcagtgcataatacaactaattaccagacaagcatcaagacctgaattcacatccatggaacccatgtgttttggtctctgttctctgctgctctggtcaaatattctgaccagaagcaacttagggaagaaaggagcttctttagctgtgcttctgtgttacagtccattctggagggaaggcagggcagggactccagcaggaacttgaagttgatcaattgtgtgtggtggtgtgcatctataattccagtgctagagaggcagatctctgtgagttcgaggccagcctggtccacatagagtgtttcaagtcagccagatctacatagagaaatattctctaagaaaaaacaaagcaagcaagcaagcaagcaagcaagcaagcaagcaagcaagcaagcaagcaagtaagcaaacagacaaacaaaacagggaatggaggcacttgctggaaatatgactcactggttaggagcaccaggtactcttgcagaaggccaaggagtgattcccagtacctacatagtggcttacaattgcctatgactctagggatcaaacaccatcttctggcctccaggggcacccaggcatgtgcgtggtgcacagacatatatgcaggcaaaatactcatacacataaaatattaaaatagtttttaaaaatggaagaaaaaaaaccaatccctgtgtgaggtgtgtactgagttagttttcaggacaccagtagagaacaaagctggaaaggtaagcagtctttcccagtttacactggtttagaaccatggtcagggctgctgtttgtgcttgactttgggaatttaccttctctgtgagggagctgtaatcacacagaacctaggcaaactctctcattcttcacagacaaggaaaagccatcagtgtgctgtgcagagcctcaggctggggcttctgacttgtgtgtggagaacccgacagactgtggtctgtccctccacccagctgtgccaatctgcaggtgtgcaggcctgtaacccaacttggtggctgtggagtgagtcctccaagaacaacatttgcagtggctcaagtatacttcatggtttataaagctcctttccacctcttaatgtgtttgaacctaccagtctctggttaccctgatgtcagagtaccccgagagaagcagagttttgttctatgacactgaccacacatggcgcagctggaagcagcacccaggctttctgaccaatgtggggcttctctacatatgtgctgcctgctcagctctgccggagaagggaaggaacaaaggaagagggagaggacaacaaagatgggagaaatgtgcctataatttcttgggtacctaccatgctgtaggcccatgcgtatacaccaactatttaattaatcttcacaccttagacatcaagagctagagagcaggcaagatgtcacagtgggtgaaggagctttactcaaacccgatgattctgagctcaaaccctagaacccacacggtcaaatggaagaacagacttctgccagctgtcctctgacctccatacatgactgccatggcacatgtatgattcccaacataaacaaataaatgttttttttaaagggagctggaaacttaaattttggatcagggttcagttggggtgcctagagaatgccccagacctgttaaaggtgggtagtgggtaagaagatataagagagggtattatttatatctctcagtcacctcatgagatttttgtcttcttggagtcctaaaagccctatttcctcattcctggtgcctcagcattcaaggtgggctagagggcctcaaaagatgcaaggtgagaccttcttaaaaccacgggcagggttctgggaccctagcctcacgaccaagcagaggttagggaaaagaacaaggagcatgcttcatgtcttctgtttacattgctgagaaaaaatctctccataccagtgctggagagattgctcaagggttaacagtactggctgctcctgtggaggaccagggttcacttcccagcacccaagtagcagctcacaaccagctgtatctccagtgtctggggacccagtgcacttttctagctcacctgggtgagcattttacacatgatgtgcatgcatataaatgcagataaaacacctatactcataaaataggagggatatttgtttaaaagccacatcctagatgactcaaacaactttatgtgtactgctcacagctccagagttagggtgcccaagatcaaggtcctggcaggttcagagttgagcttccttgctagcttttgtcaccttgctgggtctccacaaagcactttcttggtgcctgtgcatgcagagagggactgatctctccttcttttcaaagcccaccactcctgttttctagggcctagctttctgatgcattcagctttaactctatcttcagaccatttagatctagaatgacccccaaaggtctatgtgctaaatgcttggtccccagattggtgttattgtgagatggtagaggctttaagacctagggccgactagaggtctttaagtcacatttgggtaccccttaaggggattgtgggaccctggcctccccttcactttccttaataggcagtttgttgcatctcagctcctatcgtgataagctacttgtcacagatccagagccactgggcccaccagtcacagagctacatctaaccagctttttttgtgtgtataggttctaaaatttttgtctccaaatttgtaacactaggggccagtactctaatgtccgatgcagggacatatacccagtccagtccacagcagccagctgctctaggccagtctagtttgatctcttggagcttgcaaggttctgcctctgaatcacagtgcctgcatgagccacgagccacatacgtatttcaagagaagtcacgtacatagtatgtctcagggcaaaacaaaacaaaacaaaacaaaacaaaaaaaacccaaactgacaacaacaacaaaaaaaccacaaaaggactctgtgatcaaagattggtgatctccttagacctgagccatctaagcgtgtgagggggatctagtaactttgctagctggcagaacacaatcacccccaaagtcttcccttcttgggcacctccttgggtgtcactcttggtactgataggaagttctctggctattttctctgccagcttctgtgttcaagggaagggtagacagcatcaccaggatggagcctcacccattacaatcctggcagcctactctggaactgcaaataaaacatgatagaaaataaagaggctgcagagtcaatagcaagggactatggccaggaaccatgttgatttgaaagtctcccaggtatgatgtagactgaattccccctgcccccaccccttctctctttctctttcttttttcaagacagggtctcactatgtagccttggctgacctggaactcactatgtagatcagtgctgggattaaaagtgtgtgctactacacccagctaccctcaggtttcttaaagtactaataagtaagctattacttaatttaaatttatatttatgtgcttaccctgtgtgtatgtgtgtgtgcgcgcacgtgtgtgtgtgtgtgtgtgtgtgtgtgtgtgtgtatgtgtgtgtgtgtgttcaggcatccaataaagccataactccctgagccccttacaaccaagtaggttcatatgactaattctggaccaagaatgtgggcagagatgactcagactacttccaggcccagctcctaaaagaccttcctgaggtaccatttctgctatcttagttttgtttgtttgttgttgttgttgtttaaatgaatgctgagagccagtagtgacctgcaaagaccttaggttctgctgaggtcactagatagaagccagagggtttctgggtgtctgagtgaggcctccctcttttgtgttgaatgagaacaaataggagaccacagaacaaagcaacccgccctagctaacaggatatctgaaggcttctgcctcagccatccactttctgggaacctcctacctgtaaccctagatacctgtgtggtgctgtgctacagaaaggggcagactgacctcccgtggggtctttactgagaaggaagcgatcatggccagagagacccaaaggttagcccttgaaatcagtcaggtggtgcgctgttaactctcacagctgtcattcccttgagccctctgggtttagttttgcctttctgcaccagaggcagggaggagtggagaaggccccagagctccacctccgagctgctctactacaggtacccctggcagcctcctgaatagtaggagttcactcacatgtttttgtggaggaggatttgaaggagggatttgagtttttccctagagacgccagagagacagtttcatctctgcacaacaggctcgcccagctcctcatataagctgtttctgtggttacctgtcttctgggatatttgcagtgggtgggcatggcaggtgcgatctgccagagtatgctgggagtctgaaggaagcaccactgggacccacaaggccagatgtccctattatgggagatgtcaaccaagcccccgcctcctcaccaggaaactgaaaccacactgaatgtcagggaggcaaagaccccaagaaggattctggatctcctcgttgtccagtttattggtgaggaaaccgaggctgagggaatccaagggttttcttggcaagatggctggatgagttagcagaagtaattacagctggaacgcaggtcttccacctccaggccaagctcttctcttaaaccacgcgcaggaaagtgggtgacagatgcacacgggactgatgtggagagggaggagatccttgcaggcatcccagatggtcctggggagcctagggcaactcaagcctcttttccacttccctggccattgggactgtacttccttccaagtacggcgggggcgggggcgggggcggggtgggtnnnnnnnnnnnnnnnnnnnnnnnnnnnnnnnnnnnnnnnnnnnncccgcaggccagaggccaagggttagggaggtggggccagtgctcggcccctccccctgctctccttcccccttccacccccccagagtctccccgtcccgagtcccagtggccttaacacccatcgtatcctctgctgcgctgagaatctgcgagtgatcagggagctatatggaccagagtgggcgcaccgagggtccagcagcgggtgtggcaaagggcgggggcgtgaccaggctgcggctgaggcggggctaagactgggggcgtggtcgaagcaggaggcgggtccgttggaaacttgagtgcccgcccttgcgatgcgccccgccccggcctccgcctccgggtcccgccttctcttcccttccttcccgggctggcggcggctgcgggtggtggacctgcagagcggccgtcgcccacacctcgctctctcctgggccggcggatccttttgtctctccgagcggcgaaggtcgcagagcaggcgcggcggctgcgggagcgcaaacgcccgctctctcggtcacctccccagcctcggccaccgcagaacttgggctcgagaagccagcggaccgcgtccagctccagagccggtaggaaaggggaaactgcgggactgcggggttgcatggagggagcgtgtgtgacccgctcgctgcgacccggctgtgagtgaacgggtgtgtgtgcgccggtactgatggtgcctgtttctctgcgtagtgggcttgcagctgaccgcggacggtggcgtggctctagaatggcgtgtcctcgtggggatcgttgcgctcgatgggatgtgcacttttcagactacgtttgtggaattgtgtgtcagggcacagttgccggtggggatggggactagtgctggcggggtcgaggggggagccgctgtgcgcagagtgggggtggcggggtgggcgtgggcggtctgcccgggcaagctgagcccccggttggtgtcgctccgcgcagtgcgtagctcaggaacctgagggtacgactagaatccgatgggcaaagtgcctgcctggtggcagcgggcgttgacacccctcacggggtggggtgggggcggcaggtccacaaggttcacttggataattgtgagctttgatgagggatggggacccgcttggctgtgttcagctctgggacagtgggaaagaccaacccagccctggcctcgccgtgacccgccctgagacctgagcctgactgagatgggccacctttttgagtcgcagttggcgtctgtatcaagtgagggcggcccctcaggggctatcttgacagtgtgagaacgtactacacgtagttcttgacccagagtcttgcgcacagtaggtgctcttcattggattctcatctctttaaatctttttctgcctttattgaggatgacgctctcatttcctcctatacggtggtttgtgcctccttccttgatctaacttcacagcgaaagcttggagagattgagaaagtttaggcggctgggtgcgttgccttctctccgcaccttactggctgcttgacacggccttcgggtgtgcggggagctcgcagcgtagggcgctagcccggaaggctcctgcgccccggcagcgttccggaaggctgcgactacagactcgcgagcccttttgttcaacaagtgcttggaggatgtcgatctggaattagagttgcgttgagaaagtggccggctctgtagactggcagtctggggtttcaggaacctttcttcccggcctggtcattcaggaagccaccctctattctaaccactaacaagtccacccagaagagggtgttcgccaggactccaaatcctgttagacaccctccacccccacccccaagccccgcctgccttgactcccatgcagtcagcctgatacaggaggatgaggtccgggtggcaccctccttccaattccaccccttcatttaagaaaacaaatgtatttagtattgaaacctggtaaaactgcactatcctgaatatgcatactgatcttggcagttcagcctaccccatttcagtatttgcactgcgccaggcagaggggcgggcatggggctgcgtcagggacctgccagatcccttgattatttcccctccctaccttgttgttctcaggatccttccctgtttaaaaacagcttttaagccaggctctcgaaatggggcactggtgggaatgcttgccacctgcctttgtatgggatatgttccagagtcctgcatgctctgtggtgctccctacttattctctgtaagaagctggaaggtttagcaggtgttgtgacattggagcagaaacctccggtttgggtcctttgatttgtctcctgagtcctgaggtctttgagatgatggccatccagggatgtcataagctgatttttaaatcctgatgtcagggactcacttggaaaaccacctgttctcagtcttatcaaatgatttatatcctaaagagaaaaaggcaattggttggaatcttatctcccccaaatcagattcaataatcgttttttaaaaaccagtctggctttctcagctcagaagacagaccaaaaagctgtcttgttttgttttgccttcctggttaaagccagccctttgtctcaagcaaaccagtattttggccttcgatctatttctgtttcacttttgaaagcgcctgtaattaccacgctcttgaggttttattggataatgtgccaataggaaggcccaggggctgtgcctctccctgtagtgggatgtagtgccacagcctagccttacctgctcctttgagccctactttgacactgttccctaggtggtacatagctgtaaatgtgtcataatagaccaggagccatgactttgggaatggatgtctggaaagctgttagcttttggagagactagagcaagtggacagcccagaggaacaggggtttgcccaaactggccaaatactcaaaaccaatggtatgctgagaggggagattgagagggagggaaggagacagggagaggcagggagagggagggggaggggagaggggagagggaaattgttttagacttcaggtacaaggctatgcagaatcagaaatttccatgcaggggaaagggaatgggttcaggcccgcttgctgggccagctccattttctaaggagggctgtgttcttctgctaggtggtcgacttgtacctcttagccttggaactcagtcctcagaatctcaagggttgcctttctcatccagttccatactgaccagacagcaggatactttcatatgccttcctcccaagctccttctaagacgttagattgtgccttataaatggtgaaactcttgagtttgcctacaacccagcgataatcccagaccctcatggggagccccagcttttgtttggcagctctgttctttatctaggttgggatctggtttgtattagaccacttgcattccagcaaatcccaaaccatgcttgtttgatgtgtgggatgctggcccaggcttgttgggggattatgtatgttttttgagtgtttgtcagggcctgatgttattgtgcttgggaatggaggccctgggtggagttaggatgagctgacacttagagattttaactgtgctctgctttgaggctccccactccaacctacagtctttgggacttcttcagggtagctgtgtatccgtaaatcccacatcgtttgtgtagctagctctttggggggttgggttcttactctgtggaggatgtaatatatggagatattgggatgggctgaggggctcccttagtgcctcttactctatgtagggaaggataatgttcccttccatcactttttaccaaagaacaaaacttggcaggccaggctctcatggagcagagcaggttttaatatatagcttcaggtaatcaatatagtttgacaggtgggacatttcttaggtgctgttgagcaaagtgtgaggctaaagaaattttacacatacacacacacacacacacacacacacacacaaacacaggagagccctactttgaccatgtaggttcatgtaaaaataaatttccaaggcaaagctcgacacctctgcatttatgagccatgactaactgaagcctcccttctccagcctctccttctgccaccccagggcaggtgatagggcttcttagagctcagttcctttaccttaacaaacccaacacaccctggcacctgctaacctcatgtgcttgcctgcttctgtatctgtttctttgtggtgttttaggtacagcctaagttggcaagcagccaggagcctgggggtggaggtgtcagctcagctctacctgtcctcagtcctcagtccacagtgttctccaggagccagcaatgggtctgtgactaagaaagctcaagactggtaatcacaccatggtgaagagcctgtgatcctaaagaaaggaagaaaagggtggggatgtagctctgtgttaggtcatttgcctggcacgcatgaggctccaggcccaaccccctagtactgccagttacatttaaaatggaagcaggtgggggaggggaactcaacacagctttggtggattttgcttcagtatctttgggtctccattgaaaccatccattgctctaagtctgcttcagtcaacgacgagtccctcagtagaagtagtataggcagtacacctgccaggtcctccaaactgtcggtgacacacagctgtcctgtcgcctccttggctgcagccctggccccatgttctgggatgggatatggggttcatgatgcccgtcccagcaggtccaaaactctgtgtgttggccacatcgtctacccgtcacatctagacatctgggtctcattttccatcccttattgcacctggtgaatgttcaaagtgaatctgaagtgctgacctgttcttcccagtcagaacttcctcctcctcctcctcccatgtaacttggcttgtggttctgtcactgcagccctgtcaccagcaactcagtgtagaaggtgcacatttggtcaccttgttctcccccccccccccacacacacacacaaacacacttgggtttgacctctctcagtgagtgctatttcccacacttcctgtatcacccagtcaggctttgggcaagctagacctgggcttttctactgctggtgcaaaagctaagggcttgagctgaggatggggtgggaaaatcatcagaaagcctttggagctcaagagacatatgtaagggagcccctgtcccggagcaagggggcttctggaggaaatgccctacttgggagaggaatgtagagtggagggctgggtggctcccacctctctctagcctcttcctccagaattttgtaactacaagattcctacctctgaaatgatatatgtaactcagataaagttatgcctacttggtgtacagttcaatggggttgtttttgttttgtcagttcacagttatataaccatggccatcctctggcaagggccccttgaatctttctgaatgatgcttcatcttcatgggcagccaccgcctgtctcaagctccatcccacacagccgcttgtggtctgattctataactctctctctctctctctctctctctccttccccttcctaggtttgagtcaagggatctcttccttggattcaacttggagtctaccaggtagaattagcttttcacctccatgttgatggagagacctgggcacttgtccctgttacttctgcatggtgagctctcttactggtttccctggcctgtccctgacatagtgctggtacccaaggttaactcagaggatgttagctgggctgactggagttgcttttatcatagttctttctatctaaatggccaatacctagcagagcattgagattgtgtgtgcttcagatgatgtgggggccttgctacctgcaccatcttacttcatgaagaacttgggaagcaaatggtatctaacttgtcatttagatgtaaaagctgagaaggcccagagcaaaatcgcctaagactatctgcactggcaactgatgagccaggaactgagccaaccctttcgtcctgctttggttgtcacttggtgctcagcattgcctggcccgggcagattctcaatttgacctatacaggacctgtcatcaaccaaggtagcacctttcaggggaagcgtggtggatggtgtgtcttcgttcgcctccatgtctggttcagctggcagaagcggctgaattacccacatttagagagttctcttgggaagtcagtagcgagggtgggcatccttgcggggagggggtggttgagtgtcagggtgtgctttgatgctttgtgcatttcagaagtagtgttcttgcacttgtgggtactaaggcagctagcggaggaagatgccctatttgacaggtgcaccagcagaggcacaaaatggcccatgtaccccatgcagatagtgctcagacttcaggtctccagaacacaccctcaggtcacaggttacttctttcccggtggtacaggaaatcctcatggcagagcatgagtatgatgcgggacttggggactggtcatagtccacgctctcggatgtattatctgagagggttctgggcccagaggaaaggtgacaattctgtgatcacagtcactggttaaacctccttgaacagtagcgtctctgtgacattaggtaatccttttcaaatcaggctgaagggactggcagatctgtgtgtgaggctactgcaatggagctgggaagggtctgggattagagttcagaagactatcattttgggtctactttgtctcgtgacttctgagagaccctgctcaggcttccttatcacccagaagggaccctgatattgggggctgcccagattagtctgcatggtgcttgtcagactccatgaggctgggcttcctgccccttgccccagggagtgcttgggaagtgtgtgctgccttcggatgctggtgtcttctcaggctgaggaggactacagggaatgttttcagtcagcctcagagcagtgtgctcacaagttgtaccatgttcctcctccagcaagggaatgctcagctctttgctttctctctgcatttaaaggatgcttcctggaagcagagccgatggcagtcctcacctctccctggcacttccacactttccgtttgcctccctctaattcgttttttttggggggaggggggttggacagagaacctcttaaaagccaatcatttccagtatcatgcaggttttggtttttgttgttgttgtttctatttaccaagggggactgttaatagatgctcctggccaactgaatgttgtccagcctggggtccaaggagagcttttccacacaacccctgcccaaatttagctgggtagagatacactttgttaaaaacccttccacagtgcccatgtgggtcccacatttggtggcacagcctgtacagtggcatggccacagcctccaagtggggtatgtgacctgtggctgctgtcttggttccagtgagtttagaaacaagcctttctgggacacacccacgtcagcactctgggctgtctggaggatgccactgccttcatcctgaaggcatggatggatgaaggattactacctgtcccctatctgtacctaatgccattctgttgctgaatctaaatgttcccctagcctcactgttggctgagaacttgtggtttgtgaatgtcagtgagactgggccaggggaaggaaagcgcagaggaggcatttcagggcctctcagccagggaatccctgcaaggcatataaggggttccctattgcctgagctccctcgcatagcttgtcttgggagaagttactggctccctaggaaactatgtcaccagggtcaccatcaacgtcagtcagtcatcactggtcaccattaccataatcaccattatgattaccatcaccaccgtcatcatcattatcacagtcaccacaatctcctccatcaccaccaccatcattatcatcgttgtcgtcaccatcatcacctcgtctcagcactggtttggcctttgggtcattatatcacatggcacactcatgccacgtgccctacagtcttccgtgattaggggtagtagttatgaggggaccttgggcaggatggctgtgggcatagttagcttgatggagcgtgattctgaaaatggctccaggagagttacagatctggaagcttctggaaaaaataaatctcacccactctttcaggcagtgttatctggtctgtggtattctctaagcccctttagagagcccaactaaactgcttgggtgttgtttgcccacctgtcctagggcagtgaagttggaaccctgtatatttctcctgcttgacgctcccttactagtgtagagtcaggagcacaatggctgcccaggtgtgtgctggaacattctccacttgctcatctttaggatgatgatggtggcattgaattatttaagatctccacagcttgcctgagggcttggtctgtaggctcatgtggccaggccagtgtaatgctggcatctcctttgtatgtctctgctccgtgtgcgcttgttctgggcatttgtttaaacagtttaaacagtggtgacccctatcctgctaacgtctggcttcgactttgcatggggaaggctctctctagctttcaggccccctcatctgtcagatggggttcagagctggatgacttccaaatcctctgtcagtaacacaatccaggaaaaaaatggttaaaaaatgcaaacttgtgtggtaagacgtatccaatgaagagcacactgagaaaacgtatgtagccagactgactgtggtggtggtggggggggggggggagaaaagaaagaaaaagaaattaaggaagatcctctcttagaaaatacagacaccttggcaactgctgtattgcagaatgtgataggaggaggggacccaagnnnnnnnnnnnnnnnnnnnnnnnnnnnnnnnnnnnnnnnnnnnnnnnnnnnnnnnnnnnnnnnnnnnnnnnnnnnnnnnnnnnnnnnnnnnnnnnnnnnnnaggaggggtaaagcctgggaactgggcctggggctttctttcatctgcccaggccaccattcagtctctgctttgttgtataggataaggaaggaggggctcctgggaaggaggtaggagagaccctcacccacagtgggagtctggcaaaggttggtaggtgagcccagcctttggactctggattcaggctctggactcagtgccttatttagccttagctgtgtacttagctgtgtactgttcttacagggtgctctagtaagcagccacaggtcacataccccacttggaggtcgtggccatgccactgtccaggctgttgcaccaaatatgggacccacgtgggcactgtggaagggtttttaacaaagtgtttctctactcagctacatttgggcaggggtaaggccatgggtgagggtgccatcctcattataatgacgggtttgtgttcttgggagggtctgtgttggtgacctaagagcccgggagatggtgcttcccagtttgattaattgtaaattaggagacgtcagctctgtgaagtgttgcacaggatgagcaatcatattatttttttagaccagagtgtacttagtgatgtaaagtactgaccagattctgcttcagattggtcttgtgagaggattcctatgaattcttttaaaattagcacatagttggatagtaggagtgggttcctggggttggacactgggagtttaagcatttcctaagtatggggttgggaacaaaaatatacaattatacagacagcttcattttactgatgtttgagagagggaagccaaaggagactacaggaaggaataggctaaactgcaaggtcttgagtttggctgggaactgatttctcttccctgcaacgttgtatctctgtgagttttaacttttccaataggcatgggtgatttttgtaattcgaaagaccaacagcctggagagatggctcagcagttaaaagcactgatctaagttcgttcggttctcagcacccacatggtgctgagacttcagttccaggggaccccatgctctctttgacctccatgggcatagacatgcaagaaggcaaacaggaagaaaaaggaagggaggttagttggcttttagagcaagcctgaccccagcatccctagcttgctccctttaatctgtttacccagcttcccgcctatccccagactgtctggaacccacaacttccatacttgtgactgtatgaattaatggaaatgtatcataaacacaccattagagtttggtaactcaatctaaactcaatattgagtaaaatgcattaggctggatataaggaaacaatgtccatagtcctccaagaaatccaccttgtcactgtggcccggggcagtttgttcccgatccacagtacatttctgctttgtttgtttgaatttggacattcacttgtctcttgatctgaacaaagcttcctggctcccgctgctttcacttggagtattattaaaaaaaaaaatttacttagtgtgcactgtgtatgcccgtgtgtgtatgtgtgtgcatttggggggtcagaggacaagttgccagggttggttgtttctgtccaccatgtgaggtcaaggcatcaaattcaggttgtttggctctgcagcaggcacctgtatctgccgagccattttggcagccctcacttggggccctttgaagcccaggggccagtggtctcagtattctcattgtccttcctgtctgtctgtccatctgactggctggctaatgtgtccagtttcacttttgagagtaaccttttgtgttcctgtccagccattccctcgggacctggaggtaggacttgctgacattcctccgtgggaaccagagggttcctgacatgaatccttcatcttcttctttgagtcggatgctgtgggctgatgttggctgggctgtatttatctgctggctgggaatggggccatctcaaccctcattagggtcagaccatttttggtggcatccctccagaggctgttattccctgtagtttttctgccggagtccaggctattgagtcagcagtggaaagttaagaagatgaggtagccatcagagaaatgggctaatatcaaagattaattttagggcgggtaaggagagaggctctgcaagctgggctatctccaggctagtagtattgctgtgccctgtgggaagcccacagttgcctttccttccagtggctcagtggctgcttattgttcctgggattagatgtgtgttgaagcacaactttatggcctattttctgtatttatgacatggagaaagaaacttgcaattgtcagcaaaatgccattgagttggtatgtaactttaaggctttcattgtaaggatgccaaattaaaaaggaaaaggaaaaggaaagaacagggctctagtgttcagacgttgttcttcctgatgctgggttctctggcaattctaggatccagcaccaaggcaggaagcctgcttgcctgtcactgaagacaggtatgttgctatggagatcaggtatgccaccgttgtttcctgggtacctcagtcatcctagaaatggactaacccccaccttacatggtgtttctaaaggaacgcgtatgcattgactttctctaagcagagctcagctggtttatttcactcacagcatgatttctgacgtcatttgcctttaaccctcctctgtttaattattaatatctccccttccctgccagaaacacttaaatgtattgagactatatattgaaagcaacaagacttttaaaccttttaccaaagctaggaagctcgtttagcacgagttccctgtagaactcagtaagtgagttcagccagtatgggctgtgtgcccagccttgacccagggtccgggacgtcgttaaaattggactgctgagtttgtgttatggccacagtcactgcattcttagtgttctatcactaaatacctgagagaaataacttaaaaggcccaggagtggtggcacatacctttaaacccagcatgtgggaggcagaaaccagtggatctctgtaagttgaaggctactctagtacacagtacacagtgagttttgggacagccagggctacagcctgtctccaaacaaacaagccaaacacacacacacacacacacacacacacagcacacacacacaaccttggaaggtcgagaggggccagcagatggcttagcctgtaggacatttgctgccaggcccagcagcctgagttccaaccctaggctctgcatggtggaaggagagagcccgttcccaaaagcttccttctgacctcccacaggcaataaaaataaatggataaatttaatataaaaattagaggtagagaggtttatttgtgttccctatttcagacgctagtcactcggcccccacggtgtgacacaggaagtgttgaggttgatgggaaacaactcgggaggaagatgtcagggtcccattgttttgttctgggcaggcccttgataacctgatttccttccactgggtcccacctcttgagggtttcaccaaagccttcagtcctgattgaggtttgtcagccccacccaaacctagtcaaggctggaaagagggaatcttaaacgaggaaaggcctccatcagattagcctgtcggcatgtctctgggcacagtttcttgatgaatgattgacacaggagggccagtgccacagtgggcagtgccacctctgggcaggtggtcctggattgtataagaaagccaaccgaacaaaccatggagagcaacccgggaagcagtgctcctccatggcctctgcttcggttcctgcctctaggtttctgccctgacttccctccgggatggaatgtgatcttagaattctaagacgagataaaccctctcctctccacgttgctttacgtcctgatgttttatcacagcattagaaaccctagttatgacagaaactggtaccaagataatggagtattgctatgatcaaactgaccatgtgttggaggaagcatcgtggagatgtttgcaagtttgggttggaaatgccattgaatcctcagatcttaatggtcagttctcttgggggagggggtaggaagataaaagtactgagagtagtgtaggtgctggaggcctggcttgtgtacttccagaggacataaatattatcagggctgtatttagtcaaattttgaattaagaatttgtggttctggtcagctggggctgaaggattggctgtgatgaacaagagaccaggaccactaaagtgaaacttttgttttcctgggatgatcaataccggtcatctggggttaaagaatccgccgtagtggatcattgaggagaaatcttctgagaagtgtttcctcagagtcagtatgtagaagctgtagttaagatgggccaaggctgtactttgtacttgtagctgaactttgtaatgtttgagagtctcccactggttttgaaggcatgaaggggtcatgaagagcagctgaggcttggtactgtgagaggccatggaaggccaatggtacaggtacagcctcagttgcagtagaagctccaggattaaggagatcatggagagaagttgttacttggcaccatgtggcagggtcagagtccctgaagagaggctgttggtgaaggtacagcccaggtgcagtgaaactccagagttttggagatgctagtatcaaggaatgaccaccaaggacagcagcagctgttgagtggagccagcctgagtctgtgacatgagatgtgtatgctgtgggcagcaaagccaaagaggtggaactgcacaaggccacaagatcattactgaatcccagatgtccggcagtgaacacttttggactttcgtttccctttgatgtgaatgttcctgtcccctggttcttccttcttgggctaagaaatcatctaaattgttctgatctttacaggggctctcagtcaagagactttggctgtttttgaggtgaccaaattttaattaaagtattgaaattttaaagacgtatgggacttttaaaagttgtattatttttttgtattgctatattaacatatgctcttggggacaaatgagaaaggaaaagattgaagttgtagtgaagcattatgtcaagttgacaagttgtcagttgtcctggttgatttttgttaactccatacaaacctagacatagctgagaagagggacttttaattgagaaaatgcctaagagtggcctggagacaggctgatctctgtgagctggaggctagcctgatctacagataagtgccaggacaggagcctggaggagctagagaaaggatggaaggagctgaaggggtttgcaaccccataggaagaacaacaatatcaaccaaccagatcccccagagctcccagggactaaactaccaaccaaggagtacacatggagggactcatggctccagctgcatatgtagcagaggatggtcttgtcggacatcaatgggaggagaggccctgggtcttgtaaaggctagatgcccccagtgtaggggtataccagggtggggaggcgggagtgggtggggggacagtgggggaacaccctcatagaagcaggaggaaggaggttggaatcgggagtttctgaaaggggggaccaggaaaggggatagcatctgaaatgtaaataaggaaaatatccaattaaaaatgaaaaaataaaaataaaaagatgggcctataggcaagtctgtggatagggtgttttcttagtgattaatgtgagaggacctaggccactgtgggcagtgcttctcctggacaagtagtcctggactgtataataaaccaggccgagcaagccctgaagactaagccagtaggcagcatttctctgtggcctctgcttgagttcctgccttggcttcccctgatgatggattttaacctgtgagttccccaagttgctttgatcctggtgtttaaccacagcaatagaaacctaactgagacaatagaaaactaactaagcatatgggcctttgggggatacttagtccaagccatcgtagccgcaggctttgtgatggtggtaggggcttggctccctgctgaaactctctccctgtccctatgagaagagtacctgccctgccaggacgacccagcagctatgtggtggggtggttgggattcataggcatctcttgtgtattatctgtctgcttgcttatgactgttttgcatacctggcagttcatgtccaccctgggccctccccttctcaatttctccatagtcttttttatcatagttttctttcttttctgcacataggtgcatatgtatatgaatgcatgtgtgccatagtgtgtgcagaggttggaagacctataggggggttttactcatggaacaatcttgtcacacactcccccctcccaacacatacaccccatcaacccagatttctaaatgcaagcccgagccatcagctgtagacagaccgctcttgtgctgtctaggtcttcacatagcggtacttccctgtctcctttccttcatccagctggggcactggcatcctccaatcctcagggtcaacaatccttagtctgtggtgtgctggaatctgaggtgggcgccttcctcggctcacccggggctctcagtcttcttcatgtgatttgggaaccatagagctactatggcttcttgcagatgattgcccagctcatgcatggtcttgggtggtgatcttgagggtctgtgtccatgacaagcatggagaacaataaatgactttacttgtgtgtcccccccccccccccgcccccttgtcttctgttaagatacggaccatatacggtacctgccagttgtccttatagtctggaggtgaaaaagagaggattgaaagtctgtataaccaaagaaaggaaacaaacaaacaaagaaactagttattaaggtgtaattcttataccacagaagccattgttaaatttatttatttatttatttatttatttatttatttattgtaattctgtggggctggagagatggctcagctgttaagagcacttgttgctcttacagaggacctgagtttgattcccagcacctacatggtgtcacacgaccatcagcaacttccaggactcgtgtgatgcacatccaaacacataaaatcataatttaaaaaaaatgtgtgattctgccacttttagtattcacataaagttgaatacaaatggatacaatcagatttcacaacacatccatcaccctgaggaagaaatctcataggtattacctgtcacttcctagtctctctagtcttccctaggcctgcaaacccattgcatgttttgtttctatggatctgccaactttggacactgcaggtaaacagaaccatcaaacacgtgaccttttgtgtctggtttcttttattgaatacactccggtgcttcttgtgtgcatgcggtatcacatacaactgcataccgtgagtttacatggcgcgtaacaaccccctgcaggggtatactctcccccacctctctagttcctttatctggtgatgaacattcgggttgttttcactgtaggtcactatgaataacattgctggggacatttgcttacaagtctctgtgaacataggtttcatttctcccaggcaatgtaccagacttctgtttcatagtgagccttccacgaaggcaggcggaaggtgatctttgaggttgctggctgcctggaaggctcagcatgtgggaatgtaagtgcagaaagcccttctacacaaggctaggaaacaaagcctgacctcagtctctcccccaacccccccaccccccaaagccagggaagcctgggcattttagccaggagacgttcaaggtcagttaaatggcctccccattccaaagaaagcacccaaatcccaaagctttcagggcatcttatcttgtctggatagctgctataatttctggaagtagggcagcctttttgtgaccatgagactgaagttcctggacctaggccagcataacagataaacaaactaggtctttgatggcctcttaaactctgagccctggagccttggcacaggtgtaacatagagaaaaccctcttttgtctaagccactgtttgtaaccaaatgtgttcttcatggatcaaatgcccaacacaggatgaagcatttcaaagtcccccagatagatcactgcctgcttgagagactttctggtctcttctttctgttactgttcttcactcaacaggtcaccaggatgaggggttcctctgatagatataaaggatgttgataattaccatttcgttgttctgtgccttcatacatgctgctcctcctgctgggaacaccatccccctccgcctgtctgtgcttggcagagggtcactcatccttcaagtgttgtactgagaaatggcgcagagggtgggagttcttgcgaaagcacgaggacctgagcttcaattctcagaactcacaaaaaaaagtcaggcatggttgagtggtggcacatgcctttaatcccagcactcgagaggcagaggcaggaggatctctgtgagttcgaggccagcctagtctacaggagtttcaggtcagccaaggctactgcacagagaaaccctgtctccaaaaacaaacaacaacaacaaaaagccaggcatggtttgtaactccagtgctgcaggtgaggcaggaggttctcaggagctagctggctgtcaggttcagtgagagatcctgactcaagagaatacggcagcgtgtaataatagagcaggacactagacctctctggcctctgaatgcattgggtgcatgcatctgaacacacacattccaatacactgctcatacagatgcccaggcacacagacacagatttaataaaagtggactgcacagctcctcttccttctgggatgccccatgtagcttgtaatcaacatggcagagtggcattttcaaaagaaactcattctccccaataggtggagtccccaaagagcagggtctacacagaccctattcttctttctgtctggcatctggtcttgcccaggcctccccattcagcccctgggatggatggagctggggtggatggtagctgagactattgcagatgttggtgtcaagtgctctccccttcctgcgcctccttctgatgtgccttactttatcaggcatgagctacagcagcagtgatggagtctactgcctgagcttcaagtgcactagccctggcaatgaatgatgcttgtttatcatacaaataggagtgtccagtgcatgcctaggctccttccaggcccttgggacacaccagtgggaaagtgtccctctcctctctaagcttcaccgtggctccttcagagacactttgggcgtttgcccctgtctttcttgtcttttgttttacagtaggatccaagaacatggtctaaaggatgggcttcaagagccagtgggatgactctgtgggtaaagaggcttgccaccaagcctgattatctgagttcaaaccacaggactcacatggtgagaggagagaactgactcttgcaagttgcccttgaagtaccatgtgtgccatggcctgcatataagcacatacatgtaataaataaaataccgttttttaaaaagagggtgggcttcaaaccaatggccctgtcatctcagggaaaggaaagaatattgagcaaaatgaagttgaggaaagtcaggggagaaatcccgttgtgcatcatggcctttgcgaaggaccagctacatcttgctagttttggagtctgtgttgagaactcatgggccacaggtgaaacctaaagatgttgttatgtaaaagccaattaaaagtaattaaatgcaaatactgattcattgtaatgttaattttaagccctggatcaatcagaggctgtggaaatgccaaagttgttaaggctgtggttgtcatggtgaccggctgcactgagaggggccctgtgcaaagtccttcttggggggcgggggattgctctgtgctgacctctgcagggcagggcagggcaggattctgtgattcggcctgggagtcaggagaccttatgaatctcaagaatcaattcatccagaactacctgttggtttccttgggagagtaagtcacttctcttctgcctcggtttctcccaaggggtgtgctggcttttgactcccagtgcccctcgcagagcatgaggccctgagtctattcccagaatccgtgtaaataagctggacttgatggcctgtggaggctgagatgggtccatcctccgggcttgatagtaagccagcttagctaacacttacttgttgagttccaggcaagcaggagatcctgtctcataaaacagagtggacggtgcctgaggaatgtgtctaaggttgacctctggccgccacgtgcacaaccagtgcatgcacacatatgtgcacctgcatacacatgcatataccacagaaatattgaggttcaaaaggtgatgtatctgcactccctgggcttcatggtggcagtgccagagtaggcacgggggtcccagattttatggtttcctgtacttggggtttttcccagcacccacttctgcactggctgttcagagggtgtttgcagggactttcagtttattgtcacgttggttggctttgcatggaacagtactgggcctgggactgattgccttgctgtgtttgggagagcagggttgcagcggcttcctgtgactttaaggcatgccgaggtgcacagctgcgagctcatattaaacacctgccctaggtgcgtctggctcccagccctctatcagagtcctgctttctcaggctcaactggggctaattagagccactgccggctggctttgggtccacttactggttgtgtgaagcaggcctggcctttccccgtgctctgtgagggcagctgggaaatgaaacagctgttcgggacttctaaattatgtgggaagtagacttgttctgctatgtaacctgtgcagtctctgaactcgcctgttaagtgcggctgtctttcagggctccgatactaaaagatggtggtcaccagaggcccgagctgtgtccccccccccccccacagtggcctagacaccatttcagggcccgtaggagactacatctggactgaataaaaccgggaagtggcaggttccacaggaagctctgctcccagtctggctctgggctgtcaaagttaattaatagccatgtttcctttgagttttctcctctacataggtgtgtgtggggaggtcttcctacccactggtactggtcaagagactgtgaaaggatgcctaccagcttgtgtggtgaggtgagaggcagtttctgacatgctacccttgggttgtgacagtagatggcagaaccctgtggtgagtcctgctttgatcttgatggcccctctttagaagttgggttagggacaaggctgggaattaactaccagggtgtttatgcctgcctttcttccatattggcaccctgagtctcaccccttgcctgggaggtagtaggtgtgcggaatggttttatatcaacttggcacaagttaaagatactctcagaggagggaaactcaatgaagaaaatgcctccataagatcaggctgtaggcaaacctgaaggacattttcttaattagtgattgatggggaagggcatcttggcccattgtgggtgatgccatccctgggctggtggttctgggttctatgagaaagctgactaagcaagccaggaggaccaggccagttagcagtatccctccaccgtctctgcatgcttttgctcccgggttcctgccctgcctgcgtgagttcctctcctgacttcctttgatgatgaactatgtggtgaaagtgtaagctgaataaactcttccttcccagttgctttggtcatgatgtttcatcacagcagttgtaaccctcactaagatgtaggtgaatggctccaggccatggtaacagagagcctccttgaagttggtctcccagctgctgagttccaacacaggagggagactccactcagcctctctagcacttgttccccccccccccccatagccttagtaaggaaataatactctgaattctccctttggacagaatatagacagtacgccacaccaagcctgtgcatgagaattgaccagcacttgctaacagatgcccaaggttcttagcatgggcagctggccaccacagcctctcctccgtgtccactgtggatctcaagaagttgggctgctgccgtttaccagatatacacccctcctttccagcccctggctttttggtcatgttcaattcatgcccttcttcacagagagagggcttctgcctgggtgcttcctccattattaaactgtggctcctacactgtggtgagagggagggagggacagaggaagtgcaaggacctctgcagcattctgtgacctccctgtgacctcacactctgtccagcataccaggcacttggcctcgagcctcacctgcatcctgtgattggcagccacagctgagccggaggaatgttttaccttgctcagctgcaggtaaatgatgtcacagagcttagtcctgctagggcagaatgggtactgtcaatcctggggtcactcgctcacacaggtgacctgtgggagaccaggtgctcctctctgttcctgcagagtatgttggagttagacccttctttgcttcctgagagtttccagtcaagacatttctgtgagcctcagtttctccacatgtgagtcatactgacttgctcagactctcgtggggattctatgagcttttccttgtcttgctcatgtgagttccttatttcagtaacactggagagtgttgggttttgttggttttttttttttttttaatttttatttttaagcccaggacagaagccagtttgccagagtcatctgtgggtgttggtagccttaccttcagcaggacttgaatttggccaagagccctggcttattccagtggagaatggagttatttagagccacactgtggggggtgcttaattctctgggaagcatttgctgcagatggtgctaacgttaatgacttactatatatgtcttcataagtgggtgatttatggctgacaccagacccataacttctcatttccagaagcttcatttgtaatggcctgctacatttaggaagtgtgaaggacttgagctgaggtcatttctgttcatgagctgtaggtgggaggaactgggcctgtgggacactgagggacagccataagggacatcaccacctcttcaggaatggtccacagtgggcaggtgatggtcataaaggacacagaggcccagggaggttaagtgatttgtctgggttaacagctcccagtagacagaactgagatgcctctgaccgtcagtgtggaatagtgcttcatgcagggtagctgtgacatttattcaccagcatgatgtgtcagcctacctgggctgaggggatgtctaggtaggtagtaaagtgtcattgctgtgtgcttctggaagagattagcatgggagcaaaggctagcatttagaccaataggttccccaatgtgggtaagtattgtattgtcacttgagggtctgagtagatgcatcaacaaaatgtattggttattttttttgatatgacaaagcaacttactaaagggtttctttgggctcacagtttgagggtacaattcaccatgatggggaattcagaaccttgaagtagctggtcacattgcgtccaatcaggaaggagaaaaagagactgggtggtggtggggtcagttggtttgttttgtgctcagcttatatccttttatttagatgtgtactgtagccagtgggatgatggtgcgcacagtcaggaatgggtcttcctgtctcagttaaacctctctggaagcatcctcagagatacacccagtctccatggtgattctaaattcagtcaaactgacaatgaaaatgagtcatcacccaggagggagagtggacatcatctcttcgctttggtcaccatgctcctcgttcttggcctagaacccccaccaacctgagctccatcttacagacagcaggatgttggacatctcagcctccataaccatgaggaccagtccctcatcatctctctataggtctctttgtattttactggctctcattccctggagagctctcaacaccatagcaagatttgggttactttcctacccaaacgttctccattcaagatggtaggtcacccgggcaatgaagtggtttgggagacctaattatgcaaattaccttgacgtgtgggagctcagtttagcctgttacacatggaagtgatagtttgcctaaataagcatcagccaacattaaccctgaggaagggaattcttcttgggcttcttttggatacctgtcttgttctctctaggaattagcttcctgcccaccactaatgccggctaagccactgttctccaaacacagaactgcctgtctctgtggaaatgcagagtccccagcccatgcctggcttggccagccactggctgcccatggctgagcagtttgtatgttaagtgtagcctctcatctcaccacctgcagagtatcatatcagcagcttctggaaacttccctcttccctgtcccttgctgtcacagcttattttattctcttgggacaagggatatccctttttcctcctgtcgcctccagtgctgttctccagccctgcgtgtggcacacagtcctcagaacgctctttggagagttgtctgcaaagtccagtcactactctgagactggctggtatccctgtgctggacttgggttcctggagacttcccatgtgtgtatcagcctggatgctttgcctctgttcagggtggttcatttgcctcttaggacttcagggcatccctcagctccctacctcctcctaacaaattctttgtagtcttctatggacctggaaatgtggccatgggtgggattatcacactgatgctcaaccccagatgagctgcagaggaccagctcatttgagtgggctcattggctctgtccatgctgtgaacctcagtgtgtgttttattaacattttaggaaggtttaattatacaggccttagcccagactggggatggaactcagctgctagaaggcttgcctggcatgcatgaagccctgcaggtgatcttcagtatcatataaacctagttgtgctggagcgtgtctgtagttaaagcccagcattaaaggtcgaggcatgctgatcagaagttcaaggtcatccctggccgtgtagagagttcaaggctaacctgagctataggagcccctgtctcgttcaaaacaaacaaacctttagcttaagtgtggagaacactaagcaggacagcctctagacccttccatgcctaacccattgttcttgaaacctgcacccattctttataattttggatgtgctcaagaattcctaggtcatgttgggtggccttgggtctgtgacaaccttgagagccattcgagatatgatcgacaagcaaagaacctggtatgtgggagggaccagnnnnnnnnnnnnnnnnnnnnnnnnnnnnnnnnnnnnnnnnnnnnnnnnnnnnnnnnnnnnnnnnnnnnnnnnnnnnnnnnnnnnnnnnnnnnnnnnnnnnnnnnnnnnnnnnnnnnnnnnnnnnnnnnnnnnnnnnnnnnnnnnnnnnnnnnnnnnnnnnnnnnnnnnnnnnnnnnnnnnnnnnnnnnnnnnnnnnnnnnnnnnnnnnnnnnnnnnnnnnnnnnnnnnnnnnnnnnnnnnnnnnnnnnnnnnnnnnnnnnnnnnnnnnnnnnnnnnnnnnnnnnnnnnnnnnnnnnnnnnnnnnnnnnnnnnnnnnnnnnnnnnnnnnnnnnnnnnnnnnnnnnnnnnnnnnnnnnnnnnnnnnnnnnnnnnnnnnnnnnnnnnnnnnnnnnnnnnnnnnnnnnnnnnnnnnnnnnnnnnnnnnnnnnnnnnnnnnnnnnnnnnnnnnnnnnnnnnnnnnnnnnnnnnnnnnnnnnnnnnnnnnnnnnnnnnnnnnnnnnnnnnnnnnnnnnnnnnnnnnnnnnnnnnnnnnnnnnnnnnnnnnnnnnnnnnnnnnnnnnnnnnnnnnnnnnnnnnnnnnnnnnnnnnnnnnnnnnnnnnnnnnnnnnnnnnnnnnnnnnnnnnnnnnnnnnnnnnnnnnnnnnnnnnnnnnnnnnnnnnnnnnnnnnnnnnnnnnnnnnnnnnnnnnnnnnnnnnnnnnnnnnnnnnnnnnnnnnnnnnnnnnnnnnnnnnnnnnnnnnnnnnnnnnnnnnnnnnnnnnnnnnnnnnnnnnnnnnnnnnnnnnnnnnnnnnnnnnnnnnnnnnnnnnnnnnnnnnnnnnnnnnnnnnnnnnnnnnnnnnnnnnnnnnnnnnnnnnnnnnnnnnnnnnnnnnnnnnnnnnnnnnnnnnnnnnnnnnnnnnnnnnnnnnnnnnnnnnnnnnnnnnnnnnnnnnnnnnnnnnnnnnnnnnnnnnnnnnnnnnnnnnnnnnnnnnnnnnnnnnnnnnnnnnnnnnnnnnnnnnnnnnnnnnnnnnnnnnnnnnnnnnnnnnnnnnnnnnnnnnnnnnnnnnnnnnnnnnnnnnnnnnnnnnnnnnnnnnnnnnnnnnnnnnnnnnnnnnnnnnnnnnnnnnnnnnnnnnnnnnnnnnnnnnnnnnnnnnnnnnnnnnnnnnnnnnnnnnnnnnnnnnnnnnnnnnnnnnnnnnnnnnnnnnnnnnnnnnnnnnnnnnnnnnnnnnnnnnnnnnnnnnnnnnnnnnnnnnnnnnnnnnnnnnnnnnnnnnnnnnnnnnnnnnnnnnnnnnnnnnnnnnnnnnnnnnnnnnnnnnnnnnnnnnnnnnnnnnnnnnnnnnnnnnnnnnnnnnnnnnnnnnnnnnnnnnnnnnnnnnnnnnnnnnnnnnnnnnnnnnnnnnnnnnnnnnnnnnnnnnnnnnnnnnnnnnnnnnnnnnnnnnnnnnnnnnnnnnnnnnnnnnnnnnnnnnnnnnnnnnnnnnnnnnnnnnnnnnnnnnnnnnnnnnnnnnnnnnnnnnnnnnnnnnnnnnnnnnnnnnnnnnnnnnnnnnnnnnnnnnnnnnnnnnnnnnnnnnnnnnnnnnnnnnnnnnnnnnnnnnnnnnnnnnnnnnnnnnnnnnnnnnnnnnnnnnnnnnnnnnnnnnnnnnnnnnnnnnnnnnnnnnnnnnnnnnnnnnnnnnnnnnnnnnnnnnnnnnnnnnnnnnnnnnnnnnnnnnnnnnnnnnnnnnnnnnnnnnnnnnnnnnnnnnnnnnnnnnnnnnnnnnnnnnnnnnnnnnnnnnnnnnnnnnnnnnnnnnnnnnnnnnnnnnnnnnnnnnnnnnnnnnnnnnnnnnnnnnnnnnnnnnnnnnnnnnnnnnnnnnnnnnnnnnnnnnnnnnnnnnnnnnctttctagggaggggtagttagcctgtttcaggtcaagggagccagcactgggacatggcttctcctgtgcccacacatccaggtcagggacttcctgttcatcacatggccatatacccagaatgggagcttcctgtgttcagtggcttctgtgctcaaggccctgttctcacctctgccccagctctcctgttgagaatttcttagcacacactctcgaagcccatatgttctggtggtcaaccttggccattttggttttgattttattttatttttatttttttgacacagtgtcttactgtataactctggccagcctggaacttactatgtagatagaccaggctagccttgtacttatagagatctgcctgcctcttcttccctaggtctagaattcaccaccaccatggtcttggttttgatttttgaagaaaaaaatttaattccgtttttacacacaaacttgcatattttggtaagactagaaaatacgggaaagcaaagccccccacccccacaccccaaaagggccctccttctccatggccagcaagatggctctgcagataaagacacttccctgtgagtatgacaacctgagtttggtccctgaacagcacatggtataaagaaagaactaactccctcacattgtcctctggcttccacacatgtgctttggtgcgtgtacccatacacacacatatacatcaatacacacacaaatgcggtttttacaaattctcgtcattgccctgttcaaccctattagcatgccgaggtgtctctctccatttgtgtctgtccatttaaggagttctgctctttggaagcagagcacataggactcctgtcctcaagctgctcccagctgtaaaggaataaaaccgtctcactgtcacccagcctccatgggcacctgaacattatataaacatgtgctcgtgtgcttcagccaaaaccagtgcctcctcctcggtttattcttgtttagtgtaccgtggagaccagtaatgtccagcagagcaggctccctgcctcactctccttccccagcaagccctgtgcccagggaggtcagaggctcacacatggggttttgtctccttgctacacatgtagaacctcaagggaaacattgtgtctatgtgttagatgtaattgtgtgccaccattcctgtttgtcttttttcctgaaaggtgcactcagtgatgtttctatgtcttgttagtgttgacactgtgatcgagggttctggggtgttggggggcannnnnnnnnnnnnnnnnnnnnnnnnnnnnnnnnnnnnnnnnnnnnnnnnnnnnnnnnnnnnnnnnnnnnnnnnnnnnnnnnnnnnnnnnnnnnnnnnnnnnnnnnnnnnnnnnnnnnnnnnnnnnnnnnnnnnnnnnnnnnnnnnnnnnnnnnnnnnnnnnnnnnnnnnnnnnnnnnnnnnnnnnnnnnnnnnnnnnnnnnnnnnnnnnnnnnnnnnnnnnnnnnnnnnnnnnnnnnnnnnnnnnnnnnnnnnnnnnnnnnnnnnnnnnnnnnnnnnnnnnnnnnnnnnnnnnnnnnnnnnnnnnnnnnnnnnnnnnnnnnnnnnnnnnnnnnnnnnnnnnnnnnnnnnnnnnnnnnnnnnnnnnnnnnnnnnnnnnnnnnnnnnnnnnnnnnnnnnnnnnnnnnnnnnnnnnnnnnnnnnnnnnnnnnnnnnnnnnnnnnnnnnnnnnnnnnnnnnnnnnnnnnnnnnnnnnnnnnnnnnnnnnnnnnnnnnnnnnnnnnnnnnnnnnnnnnnnnnnnnnnnnnnnnnnnnnnnnnnnnnnnnnnnnnnnnnnnnnnnnnnnnnnnnnnnnnnnnnnnnnnnnnnnnnnnnnnnnnnnnnnnnnnnnnnnnnnnnnnnnnnnnnnnnnnnnnnnnnnnnnnnnnnnnnnnnnnnnnnnnnnnnnnnnnnnnnnnnnnnnnnnnnnnnnnnnnnnnnnnnnnnnnnnnnnnnnnnnnnnnnnnnnnnnnnnnnnnnnnnnnnnnnnnnnnnnnnnnnnnnnnnnnnnnnnnnnnnnnnnnnnnnnnnnnnnnnnnnnnnnnnnnnnnnnnnnnnnnnnnnnnnnnnnnnnnnnnnnnnnnnnnnnnnnnnnnnnnnnnnnnnnnnnnnnnnnnnnnnnnnnnnnnnnnnnnnnnnnnnnnnnnnnnnnnnnnnnnnnnnnnnnnnnnnnnnnnnnnnnnnnnnnnnnnnnnnnnnnnnnnnnnnnnnnnnnnnnnnnnnnnnnnnnnnnnnnnnnnnnnnnnnnnnnnnnnnnnnnnnnnnnnnnnnnnnnnnnnnnnnnnnnnnnnnnnnnnnnnnnnnnnnnnnnnnnnnnnnnnnnnnnnnnnnnnnnnnnnnnnnnnnnnnnnnnnnnnnnnnnnnnnnnnnnnnnnnnnnnnnnnnnnnnnnnnnnnnnnnnnnnnnnnnnnnnnnnnnnnnnnnnnnnnnnnnnnnnnnnnnnnnnnnnnnnnnnnnnnnnnnnnnnnnnnnnnnnnnnnnnnnnnnnnnnnnnnnnnnnnnnnnnnnnnnnnnnnnnnnnnnnnnnnnnnnnnnnnnnnnnnnnnnnnnnnnnnnnnnnnnnnnnnnnnnnnnnnnnnnnnnnnnnnnnnnnnnnnnnnnnnnnnnnnnnnnnnnnnnnnnnnnnnnnnnnnnnnnnnnnnnnnnnnnnnnnnnnnnnnnnnnnnnnnnnnnnnnnnnnnnnnnnnnnnnnnnnnnnnnnnnnnnnnnnnnnnnnnnnnnnnnnnnnnnnnnnnnnnnnnnnnnnnnnnnnnnnnnnnnnnnnnnnnnnnnnnnnnnnnnnnnnnnnnnnnnnnnnnnnnnnnnnnnnnnnnnnnnnnnnnnnnnnnnnnnnnnnnnnnnnnnnnnnnnnnnnnnnnnnnnnnnnnnnnnnnnnnnnnnnnnnnnnnnnnnnnnnnnnnnnnnnnnnnnnnnnnnnnnnnnnnnnnnnnnnnnnnnnnnnnnnnnnnnnnnnnnnnnnnnnnnnnnnnnnnnnnnnnnnnnnnnnnnnnnnnnnnnnnnnnnnnnnnnnnnnnnnnnnnnnnnnnnnnnnnnnnnnnnnnnnnnnnnnnnnnnnnnnnnnnnnnnnnnnnnnnnnnnnnnnnnnnnnnnnnnnnnnnnnnnnnnnnnnnnnnnnnngctcagtggttaagagcgccgactgcttttctgaggtcccgagttcaaatcccagcaaccacatggtggctcacaaccatccgtaatgaaatctgatgccctcttctggagtgtctgaggatcagcttacagtgtacttacatggtagatccatacagtagaatattacacagccataaaaaagaaactgacatatgctttcacataaaggaaacttgacaatattactctcagtgaaagaagccagacacagaagatggcatattgtgttacttaggtgaaatttctagaataggcaaatctaaagaaaggcaaaatagattatatcagggattgcctgggggcagggaggaggggaccagaaggggactgctgagcttctttttgaggagatgaaaaatgctcctggaattatacatctgtgatagtcaactggaaaccccagggctgggttgagaacacagctgtgctgtacaagcacggggactgggattcaggtctccagagcccaggtaggagctgcatagattccatgatcacctttaatcccagaacttagagaatagggggacagagacaggaaggcactccataggacaagttggaccaactgaacggctgagctccaatctcaaccctgcctcagtgaattaggtggaatgggctggaggacggctctggatttcagcattgagcctccggatacacatcacacacatatactcatatggggggtggggtgggagcaggagcaggccacacagacaatactactgcaaccgtgtaaatatgagcagacactattttgacagcctatggggagtcacataagggaacgaagtgaatttgagactattatcctggccatgttaaattggcttgcttaagttctttaagctccactcccatctgaaacatgggattgctcccactttgtagggctgaagacttgatggggtgacgtttgtgtgtcttcctgcactggtaggtcccacagagaggtgcctataatgattgtcccctgctctgtgcccagcactaagttgggtaccaggtggtgttgaggagggtgaagcagtgctcagagctcacctgtacccagagtcagcttgcaggactctttgacacagcatgcttggagatgtggtcacagaacttgtctcatactcttgtgtcccactggaagcagatctgtcaatcagtgcttgataaagaaccagaaagtgccagaggcagcagggcaggcgccctgccgacagggagaacctcatgcatgcctgctcctggcatctgaggatgtattagctcatacaattgtccaggcaactgtggggcatgctgaagcagccaccagtggagtgatgagatgtgtgtgatgagttctttagaagcactggagggcacaaaggagttgagatgcactgtgacctggatataggattctgggtgctaaaacccatcttcatgcctttctggtttatatcttgaaatttttacagaggagaaaaaaatgtttgttttgagatagagtctcattatggagctctggctggcctgctcattatgtagagtaggctaccctcagacttacagagatttgcttctgcctccctagtggtgggcttaaaggtgtatactaccagagcaaagtttaagcatcttcaaccaagcaaggtgggtgtttgtgttttaagggaagtagaggcctagaacagcagttctcaaccttccgaatgctgtggctttttatatagttcttcatgttgcgatgacccacaaccataaaattatttccattgcttatttcataactgcaattttgctactgttacgacttgtaaatagctgtgttttccagtggtcttaggtgacccccgtgaaagggctgtttgacccacaggttcagaactccaggtcacacagcaggcctcggagtcggcttgctaactctgtgtctgtgtagagcttagcaacaggcccagtggaatagtctctggggctcacaagcctcctgaagtgattgagtgtttttggtcctcctgctgttggagcatcagaggccctgaggcttctgccaggtttcaagatggggacactgtcctctgtcttatagtgtggagtgttcttggttaacccagattaagacgcttggatgatgttcttctaaagagaaaaaaaaatgtgtgtgtgtgtgtgtgtgtgtgtgtgtgtgtgtgttagggctactattgctatgatgaaacaccatgatctacaacaagctggggaggaaagggtttattcagcttatacttccccatcatagtccatcactgagggaagtcaaggaaggaactcagagctggaacctggagtcgggctgatagagagaccatggagaggatgctgcttactggcttgctccccatggcttgctcagcctgctttcttctagaacccaggaccaccagcccagcgatggtaccatccacaaagggatgggcgctccgacatcagtcattaagaaactaccgtgcaggcttgtcttcagctaggtcttatggaaacattttctcaattgaggtttcttccctcctctccgatgactctagcttgtgtcaagtagacataaaattatccagcacagtgtgtgtgtgtgtccccaagataacatccaccatcttccctatcactcgtctccctccaagctccttcaagcagtcagtcatagaactgagggtgcaggtgagcccttaaccagctgagcggcattgcagaatttcttagtctccctgagccaggtgtccatacttgaacaggagggaacaagtgttcttgggctgattgttctcagcctagattgggactctgaccatggaagaggagtagagcagtgtagacccctgtgctggaagctgtgtcatggacgtgggcatagtgtttctggactcgagaagaaggctccagttatgagtaatgtgcattccatactgagtgactcaggatgccctataccatagcagagggcgaactcggaggtcaccagcagcagacactggcattccctgcctcccacccccactgaggtagtttcccatgggtatagcagggtgaggcatggaggggactgaactaagggcacaatctggcgccgacagagcaggtctaatgcaggacagaattctgctcacacccactaagttcctacagtgatggcctctcaggttctggctcacctctcaggcctaaggagaggcctgcagcttgctgaagccttagggccctgtctccgtgctctgtgtcatccctgttcattgaaatatcagagctctcctgatcacaccacccatgtcacatgagccttgaactgcttccctctgggttaaaacatcccttcccctcccccaacatctgttctaaattttagattctgcattgatgtggattagatttggaataaattgcatggtatggttcaccaagccaaactccacatcatgtacttgggactggttctcttaagagaatacacacacacacacacttcaggccagctggcctgggcagtgtctccaacaactcccaagttcagattttttacagaagtcacggcacagacttgccactgggttccagagtttcctgaggtcagacttggccatgatggaggttgggagctttgggaatggagggttggtatcttgaaacagagaccctcccaaagctcccatgagaggagttcaagagtcctttattgtaaaacaccccaccagttgcaattagaatggggtgtgtaggattcgagatagtccgttcattggtgagaaacgttgagaatttggcattgagtgagtgagttctgggtggagtggggtcccctgttggagtctctgcatggtctgggcaggtccaacctgccatcagtcaagactggccagccctagctcctggacatagccccaacaagacttaatccatgaccttctttggtcagccaatgggagagtgtatgtgtagatgacaaggccccagaacaaaagttgccacctggagcatggagagaagccttccagggaagcctcccagggaagcctgaggcttgctctgaacctctcaagacatctcgctgttgacatgggaggggctcatctgagtgtgttccaggcacaaggaacagcatgtgctaaggtgcctggacctcggggctggatcaaggcatgccttaagtgcctttctgggagtcccatcaatctctgctcgggttttgtttgtcttcctccccagttttccgtgtggagggaggtacagtccgttcccagcctaacatgttcctgccaccatgcagaagtctctctgttctgaggctggaatccaaggctgtggcctggacatggcatttatacctcttcttcgaggccttccccacccctccttagagaaaggccatgatgtggaagcaggagctttagagatcagctgccttgtctttgaggtctggcttggggctcagtgtggaagtcagtgccccgccactgtgacaaggactgccctccatgaagcctcgagtgtaggagttgtttgcttcctgcccctggctcctctgtactctggaaactgctgagaccacatgtctgtatggaaccagccatactgaagctggtatgatcagcgagggctctgctgtcccagtgtcaaaatgactgtggtggtggttgctaaccatccctgtgcatctttactggggccagacttccctgtgacccaggtaatgcaggaagccactggactgtgtgggctgttaagtttcactactagcctcttcacagtaaatctacacacataggcctctgcatctgcacttccctcttgcctgctgggctgctaggcaggcttagctcacctctactttgccctctacagtttagaagtcttacttatcttcaaaggcaaggggccccaagcacatagagggttgggttctgcaacttgagaacacttcaaactgacctcaactaaaagtcagtttcaagccaggtctctgatctccctagaatattacccctagggctgggaaccccactagacaggaggactgccttcctgttatgatcagggcaggcnnnnnnnnnnnnnnnnnnnnnnnnnnnnnnnnnnnnnnnnnnnnnnnnnnnnnnnnnnnnnnnnnnnnnnnnnnnnnnnnnnnnnnnnnnnnnnnnnnnnnnnnnnnnnnnnnnnnnnnnnnnnnnnnnnnnnnnnnnnnnnnnnnnnnnnnnnnnnnnnnnnnnnnnnnnnnnnnnnnnnnnnnnnnnnnnnnnnnnnnnnngaaggaaagaagtgaattgggaaagggaggagatggagggaaagggagggaggaatgaaaggggagggagagagagaaggggagggagggaaaggagatgagaaagggaggggagaagggaggggaagaagggaaggagggaagaaccagaggaggagcaggaggaaggaggaggaaggggaggaggaacaggagggagagggagtagagggggagggagaaaggaggacattttctttcctaaaaaaggaactggagttttaagatttgttttattattttaattatgtgcctgtctgtgtgtgggtatgcatttgtgagcataggtgtctgcagaggccagaaggtcagattcctcccgaactggagtcataggcatttgtgagctgccagctgaaggcaccaggaatcaaaacagggacctctgcaagtacagtgagtgcttctaactgctgagccatctctccagccccattttaatttcaaactatgtatatgtacgtatgggtatgtgtgtatgagtgcagtgccctcagaggccagaaaaagacataagatcccttggaactggagttccaggcagctgccccgtgtgggttctgggaacccgaatgggggcctctgcaggaacagccagtgctcgtaactgctgggccgttgctctagcttatcaggtcaacagtttaaaaagaaggggaatgttgctcccttgcaatattgtttgtccctcccctgccttttgtgccttccctgacagtggctcccttacccacactagctgcacacagaggcccaccctgtccctataacacacactttggctaaaaaagaccaccatcctgtctcagctttcttccagggacagagcgacctggtggcaactcagaccgacatgtgaagaaccgacagcaccattcattacctgccccaggatggacagtgggctctggagctttcgctgtcttgggccacggacactggattgcatatgtccagtgctgggcttgtagggcccagctggagctgccttgatctaaagttgaaggacagaagtaaacccagttcttgcaaaggggacttttagatgcttatctagtgacatctaaaaccctcctgctactccttggtggggtgtgctgagagaggggagggaggacaggaggaagacgggtctatgtgaaggcaggctgtgcttttcctcagtacatggctcctgtgcaaggctctccccaccccacccccacggtcctcttggagatctgcactgctctgcttatggggatactgagctgcttctccagagggaggctgtgtggtatcctgtaggcactccacgaggagcgtctgtatggagcatcctgcgtggcatatcttccttggagaaacctacatggagctcagaatctgttgttttataaccagttgagctgtgtggaaaccaggcctgaagcttcccccattgcaagctaaaccaaccacaaaccaggcagcaaagccacgtgaatgattaagtaccacagtgaactcaccgccctgaggctttgatctcccaggctcctgttcctgcacacagcaccaggggacatcgccttggatgttgactctagcacagccatcttgggaccagctaagctgtctgtcagggagtggtggtggttaaggctgagccaggactaattatataacagagcctggatctcaggccccacctgggcaggccatttgacagtaagggaacccaaataccttggattggcacagagcctgtttatttaggaagtgagaaaaggcacacatctgctcagcggtgcaaaggcaagccaagttcctaaagtcgcccagccattgtcttggtggaattgtggaatagcttcttggatgtcactctttcaggccctgaaatagagccttgtgcaaagaaatgagaataatgacccaggcgtcccagcccccattgtaccatctggtggctcagaaatcttttataatcaaatgagtaaggagacttctcacacttcacactgtctgtctgcgtgctctttctctttctctctctcacatgcatgcgtgctacacgaacgcagaatctgaagcaacagccactgggaacattttttttttttttttttttttttttttgctgtgttttggaggcttttctatgttgcctgggtgggtacacagatggtatgtttagccaaagcatgaggggtaatttggaaataaatggaagtttgagtctgtggacacatctgatgcatttgtgtgctctgtgtatatgtctgggtccgtgtgacagacaaccaaagcttgtatgccttggggtccttaggcctctgggttggaacatggctgacactcacctggcagtctttgaccttcttgggagtaggtaggccagaggagtagtgatcgtgaccggtaatgagaacacagtgtcccaagtaatggcaaaagaagctttaaccccgggaggagatggacggggtcagacccagcccacttcaggctttttgaagcccacaggccttttcagggccggcctggatccctagggagacaagccctcatctccaaatttgaaaatgtctgcctacctccacgtctacccctaattggtgccaattctgtccacttggccatttaagcaaaacaaacctccacgtagcttggagtcgacccttatcaggagccggtcagggtgtgaacgggctgtgctgttgggcagctggccagccaggttaacagcctcagactggggctggtggtgtgtccttgtgctggcaaatgctagtgtggtatgctcaggacctcacagactgagtttccaccgtgacaagggatgaaaccagcacccagtctctcttccctctccccgctcttccctgctacttttctacttctattacagctctcatgccccaggcagccaggaagtctcccctcccttccccctctttctggtggggctcaggacctctcagagatgggagagtttaaacacgtgttctctccctctctgcaccccacccacctttggcttgcagactgctgcaagctgttttcctccccagaagaacactgcagcagaaagcagtaaacactccggagtctcccaaacactcgctcagttggctagagtgccgccaccagtagacgggtagacgctgttcaggtgagttcagcttcatgggtagtgtaggtgccactcagggaacaggaaggtctttgggtctgggcgctggacgaatgaatgttctttgggacttatttatctgcttcttgccatgtcacagtgctgtgtgggggtctggtagaacttccataggaatcccatggaggtagtagaagtgggatagaaaaggttttttcctgcgctggtgagtcacaaggatttcatgagtgaaatatccttccctttacttcacagtggtccccataacattactgtcgtaacattgggtcccaagtatgaaccacagtactgtgcaaatggtggcagggaggaggagacacagtttaaaaactatgccgagcctggagagatggctctgcagttaaaggctggactcacaaccaaaatgacaaagcctcaatgtccactgatctaccaacccttcttttgaagtgccttccattgccctgggcttccgggatctgatttggaagagtggggagttgtcatccccagtgaaagctctgctttcagccccccaccccctcagactttctggaactttctgctagcccctatcttcttaggtaaaaatgcatctctgtctcctccatgtcatctggctttttattcttccctggggacaggaggtggtatgggaacccttgccccaggcctcctctgtggtattggatatcattaggtacattgtcacatcagcttaatatttagtccctaggttccgcatcgatgcctctcggttgattcacacaaggctcagtgtagcagtctgcttcaaacattaaaactatggtcctagggatggggaaggagggacaggggcagggccacctcagagtccagcttaggggtgtcctggccagtcacccaagtgtgtgttccttcctgctttgatccagttttgagatgtctgttgtaagtctagctggtgccggggttgggaaggggaaggctacggattaagagccagcgaggcagactagtatccagcaattttgtacactctaagcagcaacattgggtttctttttaaagcaatctggattttggccacctcccaggaaatccggatgtgtgtggcgagatgtggctcacgcctgtttggtctagtagtccggcttctttgccagaaactctctgtgaagttcccagcagctgggccgcagaggtacatgaaaggcctatccaaattccaggcaaatgaaagaatctgtgtcatcactgatacactcctgatgacagcagctacctgggtgcctggtcgctctctgctgctgttctgtgtgcgtctttcctttgcattttgctgttactgcgcctaggaattttcttggctcctatgacgcagctgaccatggcagtggatgttcctgaatttcttcccattattactgtgtcggattggaatgcaaatcttaaaaaagaaattttatcatggttttccactactataaaagtagtaacaagccaggcatggtgactcatgtctatacttctgctgctcaggaggctgagacaggaggtttgccatgacttctaggccagcctggcctacagtgtctgactgccatccttcaaaaaggaaaaaaacgggctttgggatatggctcagttggtagagtgagtgcctagcatgcacaaggctctgggttcaaacctcagcccgtcacatacctgtcttgatgatgtatccctgcaatgtcagcatttgggaggtagaggcaggagaatcagaagttcaaagttcaaagaaaagaaaagaataagtttggactcccatttcatcctgtataaaagaattaactcaaaatataccaaaaacctacatatagtggctaaaactagaacactcctaggagctaaatgagcaagtcttgaccttgagttagaccatgacttcttagatatgattcagaaagaacaaacatcgcaagataatgcagttgcctttcaaaggacactgggaagaacttgaaaagaggcgggagaagagaagagccagactgcaggcaagatcattctagacttatatctggaatgtgcaaagagctcttacagcgcagtagcaaaagactctcacagaaaacatcgggcaaggcgcttctgttggtacttttctcattgctctcacaaaaggagaaaagaagaaaggatggcgccaggagcctgaggtgtctggtcacactgctacacagtcaggaagggatggggacatcctggtgctcagcttactctctccctcttattcagtccaaaatcctagcctacggaatggtggccccacacttagggtgggtcttccctttgttttctaggtgattctagatcccatcaagttgataatcaatgttagccatttcttaaagaattcataaaaggaccatgagcacgtgacctcccagaatcacctgtcatgagaggcatgtaatctgagaccaccataaagggccctgccatacccaccaagaccctgagaatgtcaggcagatgcagtataggggtggatgtggggacaacggaacccttgtccactgctaaaagcaatgcgaagaaaaggaagcaatcataggagatggcaggctgtgtcatcccgcttccatgaaatcttcagagcaaggtgctccatagagagagtatgggcatgcatggttacctgggatggtggtcggagggaaattggtcgtaagatttcatttggtgtgtgtgtgtgtgtgtgtgtgtgcatgtgtgaaacatactgttgtcatacatacagaggtcaggacaacttgtgagaacttgtgagagtcgattctctctctctcccccatgtaagtcctggtgggactgaactcaggtctcaggcttgatagccgctccacagcatcattatcatcatcaaggcatctttctgacccaggtatgacatttcttaggagggagacaaacatgttctaaagcatatggtggtgatgaccatgaggacctctgacaactgggctccataggtggacacgtgaagtgtgtgctgagcaagctgttcctcagtggagatgtatgttagtcccaccttgttgtgacaagacacctggcaagaggagtttctagaaggaagggtttattctggctcacggtttgaggggacccagtcccatagctgtggggagtcaggaagcatggagatgcatactgctacttggctcctatttgtcttttcattcactctgggcctccatctaagtcagtggttctcagtcaggggcaggggtgggggtgttcaaacaactctttcacagggggacacctaagaccattaggattacatagatattcacattaggattcataacagtagcaatgaaagtaatggtatggttggtggggggatgtcatcacaccgtgaggaaccgtatgaaagggtcgcagcattacgacggatgagaaccactgatgtagatcataggatggtgtagccctcattcaggatgggccttccctcctcagtgaacctctctgaaggtgccttcatagacactcactccgggctttgtctcctaggcagttcccaactctgcttgacagtgaggattgatcaacacaggctgttattttaaaacgccaagaacttaacacaggagctctccttgtgtttttccttccccagcgcacatttcagtggcaagagctttccctcagtgtccccccatccctacccccaccccgcccagccagtctgggaccttcctttcttcctttccagtcccaaggaatctactcagaaggcaccttgcccgccacccacatatcactagtgtttgcactgcagtcttagatctctttagctctcctcacgtgctgctttcccactggaaactgtccagaggtgaactaactgtcccagaaccaggtgactgcgtttccattacctgctacacaccagtggctttgcaagctggggcaagatccaggccctgcttcctcagcagccacggccatcccagaagttcatcctttgctatctgagcatcaggtgagcgggagaaaccccagaaaacaatccagggtaggagcagaaggatgggagctcggagcctggtgcttccccaggaggcagggcctctggagtctcagtgttgccgtggtcctctgtccagatgtcaatcattacagccttctgtatattagagtgaaacaaaaataatctgctgtcccctgtctagctagggcgctctatagtagtgaattctgttcttcatctgtggagtgggttggatcctttagtgacctgctctggtcagcaagaaagcgaactttgaaagcaggttgagctttgggctgggttaagatgaggacaaccctcatcccagctcctactgcaggggtgacactgacaacacattttcagccccgctgtcctaatggactttggaagggccacctctgccttccacactcacctcctcatctctcatatgggaaggacttctgcccctgcccattttgtggccagagagcccacaagtgtttctgcgagttatgtgagcacaagtcttctgctccatgtttcagatgccagtgatgactctgaaacggggtggctggcttgcactggactccacagagaaggccatgttttctaaatcaagaatggtctcaggcatgtccagtgggtgctttatcagcgaggttaccccccatccctgccctgctcctcaacaactttctagagtttgagtgagagccaaaatacaattaaaagaaacagaactacgttaacttacagggctggaacaaactcagaagtgtggaatcttaaggccccacaaggcatccccaggagagccttggaaaccggttttccttgttctttggggatgggagcccctggctgaggtgttacagcagtggtactgggcccctcttagagaatgtgtgcccttgccatgagtcacgacacagtcacttacccttagaccacacagagtgtgggatggtattgatttgtgggcctttaggcaaaacttactcctagctggtgagagagctggtctgcagatattctgggcaggactggactgcaaggccatagatcagggcctgttctgctcttctcctccactctctgagtgtgtgggagagcgagccagggacagatgggaggaggtgtgggagagacactgaagagggagggaggggagggggaggaagagagggaaggagggtgggagaagagaagagaaggagttggtgaggaaagaaaaagaagaaggggatgtggagaagagggaagggagaggagggggagtgggggagggcagtcccagctgcaggggcagtagcaggagcccccgctcctgacgtgagtacttggcctttctctgcccttgagaagcagttttggtcttcataggcatcctgagtgtctgagttgttttgttttgtttggttggttggtttttggtttttaatctttcccagcccctagcccctgctgtcctatcagggactgactgcatgagcctgttctcaaccagctgtgagattgcaccaatgcaatgctcttgcttaggcacagagtcctccggggccatccggtactaaaataccttaggccatctgcacctctgccggtgctgtgagactcggagcctggcttctgctctctggaagagcttgttagcatcctgactccttcccttctaactgtccctcctctgtggaagaaatgtgcattgctctccaaccatgtaggcttgacataaatgtgtcatccaactggcaatgggctcaaagctaactagtcaccagcacctaggaaatactcctgttgtctaccactcttcattcattcattcattcattcatccactcacccactcttttgttctttagattccagtaacaacctgtgagacaggcatgtctttcttgtttgataaactgatgcccagcaaggttaaacaagttgcttatggacacacagctcctgaactattaaacctcacacttacccagaagaggagacaggatccatgtgtagggctcttgagtcgagcacagaagcactagcccccaagggagccaaccccatctggaaaggtcccacagagaaagccctggtgtttaaaggaccaggggctgtggcggtgaaattagccttgaaggctagctaaggcctcagcaagaagaaaactttgacagaggccacaatgggccaagataatagagcacaagtgtccaggaggaccgccatgagctgggcaccagtgggtaccactcatactgctctctgtcctgcagctcctctataaggtgtggctcccctaactcactactaaggatcccacggccccagagtcagaaatatccatctaagtctgaaagtgggatttgcgcctgcctggtttcatcagggcactctgtctccctgtcccattcccaccagtctgaagactggaaatagcatccctcagtattggttggatactaagagcactcccctataaggagtccaggcccatccactcgcctctaatcctacgcttgtcctgggatttctcacacctatccttgcaaacatcaccccatctgacagcatagaagcttgcaccctccctcccaggccaccatcccccaaagcctgactgcctgtcttaaaaggagagttaaaacagtggtgccctccaggaatggggatgccttccagctatgtaggaggctgaggcaggaggattgtttgaggccagctggagcatctgtctcaaccaatcatggcggcagagaagagcctacactgcccagtccaggagtaatggccttgtattcaaggtggaatgagggggaggccacactaagccaggatttgcaggtgacagccacctggccaagttcccaagcctctggttttgctcttcctcgtgtgcgtatttcccagtgtttccttatctcgcacccttttctgccttgggagctgtgtgacatgtggtctgtgtgtcatatagccaggagactgagcagcccagagaggatgccaaggggacaaagcccttgaggttcagcaccctcgagatcctctctggttcagtgtcttttaaagcatgctagaaagagcaagaagctctgtttctttattagatcagcctgcatcaatccacaagaagccagtgttcttttaaacatcacgatgcttcctccatacacaaccccaccccccggggccccgcgccccgcttcctcctcacttctctgaggtatctgcagaacaatgttatttattcccatttgttttctctacctgctgtttagagagaaaaaaatcaagagatagttttctccctcccttccttatctcgttcccgcatcgctaacaataagactatcttcctatgaaacaacagccttctctgtgcagaaaaaggtatgccttggcaggagagagagattatgaaggaacagctgggggtgggggaatggagaggcataggagaaggttgttcacccattcaggaccctgggtgtgacctgggcccctgtgcctcttagactgacttggaaaggcgctgaagcttcaccctgcctggaagtccctcttaagtgtacacttggcccaccttgcgtgtccagcttgtgtacctcgtggtgtagcaccctcagaaaggggcttcgctcctataggagtagatgctagaaatgaggagagcatgcaaggtcccatttctagccaaaactatagccaccattactgccattgctgaatgcccctgaccccaccagcaaagggtgaatacaacacagttgggtgctgagacagccctgcttcttaatggagaacaggggtaaattaacagtgatacagactgtccttggtaggctcctggacagctgtgtgcttgggatgtgggtggaggcatcagggtcctctggattcatatcctgcaggacttgtgggtgggtgggtgggtggtgtccaacaggcagccagttcttccgtagagacagagaaagtgtctttaggtgcctggctcatgggctatctcctcctgctttctccttatctatctatctatctatctatctatctatctatctatctatctatctatctatctatggacagtctttatgaccagcagtagagggtaccgggcacctccaggatgccaggctttgcctctcattggtagaatctccattgcagcagctgccagatgtgggtcctgctaccacggagcctgccagcctgtcagcttggtgtcctccacacgggaccggaaggatgactgggggatgggggggggtgggactacctcaggacatggcacactgacacaatatggtggctcagggctttccataggtcgttaagggtagccagctcatagggagaccttggttagtgactgtataggggctggtcaggagatggtgggtctaacatagaaaccaagtggctatcactcggagtctaccacctagttagaagccactgaggagtgggacccactctctcctcctttcttcccccaccttttgtttttgtttttggtttcttgacagggtctcctgtggcccaggctggctttgaattctctatgtagctaaggatggccttgaacttttgatccacctccctctacctctcaagtactaggagtataagcacgtatcagcacacctgctttatgtggatgtggtgggcgggtggttgagccacgagcgcgctacccactgaggtacactcctgaccttttcccagaatttcaatctgtgatcctaatgaccttcaaatagtgggaagggaggattcccagagaagagtctggaatagtccatcatctaactgcagttgacttaccagtcttgcagctttcgtttgctgggaaggtgatgtgatgggggagcctgctctgcattctgccctgaacttctgccactccacagcctgagcaaaaccaccagccccccacccccacccccgcccccacacttgtcagcaggggttagcaggtgttatctgtgcatactggtttgtttacagaggggcttatgactccctccccagcccagactctgaaagccactgcctgctggaccactgttgaccagaagtaccgagggataaggtctttttgagccttcagttgggcagacagcagtctgtatgagggtatgagttggaggactcctgcgcagggaaggtcttcagggccatgtgcgtaatggggaaaaatctaaggcctaaagagagaaactggctttcccagagtcacacagccccaccccacccccgccctgtgtgtgtgtgtgtgtgtgtgtgtgtgtgtgtgtgtgtgtccctgccagcccttattctaacacacagtatttctgaagtgtgcgttggtgtgttgggctttctacttttccagctgtaatactgacagagtgttggaggtgtggacccctctgtggtcgtgtgacatcatggcaaggaagaattatgacttggagagatctgtaaatagattgatgggcaggagtctgggggttaccctctaagcagccctacttcagctgtcctgataactttggggctccagtagccctgcttgggagcctctagaatgggctcctcaggaactgtcttaacgctttgcctatgccttttaaacaaggctcccctccaccccaccatgcagagcaagcagggtgttgtggggaggcacactctggggggaaggcaggcgctgggagctgggtgcagagtacaccctacctacctatgaagtgtcctgggtagagccagaatcttcatttcaaaagatattttagctgattttaatctcagtactccaggagctagcctggtctacaaagcgagttccagaaaagccagtgctacacagagcaaccctgtctcaaaaaaaagaacaaaagaattgttttgttattatttttaaattatgtgtatatgggttgtgtgtgtgcacatgagtatagtaccctcataggccagaagagagtgtcggatccctgaagctggacttacacacggttatgagcgccacaacatggatgctgagaactgaacttgggatctcttgaagagcaggacccattctcaaccactgagccatctctccatccctaaagatcttcatttgaaaggaactcaggtcggccctggggtcaactgcagcttgaacacagtctggcaaggtcagagggcttgtttacgctcctcactgcccctcaaggctgtgcctgagtcaattgtttcctaccgctggaccttgatcctcttatcccttaaacaggctgtcaccctttcctgtttgctggctgtagaggtcacctagagtatacaggacatacgttgccttgaggctggctccctgtgtgtgtgctgggcgagcagtgcctatcctgggcttgaggagtgatgggcagggcagggcagggcagggtgattcagagtgccaggatgtgggaaagtttgttgggaggatgccaggccaggaccacagggtggggcctccggggaactgatgtgtttgagtaggaaggaggagattgcattagagcttcaagccagtctaaggtggatccttctacccttccagggcacaggctcccagcacccaagatgaggaggacacggagcccaagaactgtaagcaggtctgggagctgggcctggggctcccaggcttgccctaaaccacagtaactccctgagtatgagggagtaccgtggggctctgagcacaggggtcagggcagcacccttctgccctcctggaggtttgtgggctcattcaggataggtaagttctgggaaaatgctggatgtgattgattgctgatgagactccttttcactatgaaaagtgttccccctgatgtcacctcccctaggagtctcctcttctattcacatccgtttctcctctgagaggtagcaagccccaccccccaccccctgcctaacatatgtcccaattcctctgaacaggttttgaaaaagacccaggatttatttgtgtcttagcctttggtgtatctgccctgccacgctgagttctggaactcagtcagccagcttgtctgcagaggggagaatgaggtctccaggagtctggctctggtatgggatcctcagacagtagggctcctggtcacctcagtaagttctggggtggggtaggcttgcagtgatagggctggcagagtccaggcaagtgacaggcggcagagtttcatgggagactgggatgcagccagatgaaggcctcgtaaggataggcaagtcttccccacaggctctttctggaggttgaaaccagagtggtcgacgctttactgtctggtggtgatggttgtcttcctccagccacagtgcttgtcttctgctgataaacagcagtttaacagttaacagtagttaacctgctgtcctcacttggactcaccaccctgggctgaggtggcccttctgtgctctgttcatgagcaaggctcaagaacacggctcataggaggtgtagggttggtccatcggccagttgaggatctctacattctaatttcatttttctcctcgctgtctctgtgcacatcttcacttgctggacgtattctggatcctaagagcatctcatcaacctcaggctagtcttgtatgtagaccaggatagacatcacgtgacagaggcaccatcgcctggttttagaacaagtgtcacaatagctccaagatctgctttccaatctctgcctcactaatagccattcacaatggtctccaccccatcttaccatgcctggccctttgtgatctgactgtttctccccataacccatcatttgtctttgcctcttcctgcctcagcagctcactgttcactctcaaaaccatagaaacaactccaggtgctctgcaccccatgctccaacagccctgagcacctgcaccctgtgttgtgacaatcctggctatcctgtatcctggggttctacagctccaggatctcatagttctgggcaccctgtatcccagcagccctgggcttccatagtcccagatatcctgcatccagggtgcccacagctctgggttctcacagacccaaacatcctgtacccagggtacacgtagctctgggctccacagctgcacacctccaaccccctatgcctcaacagctcagttgtcccaggccccagataacttgaacctcacgtctaaacagcctatggcatcctacccccttggtgcccacagcccctagtgtccacagcccaggatcccacaatcctaagcacctggcaacaggtgtcccaacatcacttagcatctatagccacgaacatcctgtccctaggtgttcacccacagccctagactctcatagttccatgccctaaaagctccaggtatcctctgtcccaggcaccaacagcctttgcctcctaacagccttatgaccagagccctgggtatcctgcacctcatgacctggcaaccctgggtatcctgaccccacgtgcctacatctaggttccaagagccctggacagcctatccccatgtccccagggcttctgtacccgcaaggtgcctataccacatgataccctgacttcttgcttctttactacccaggttgatgtgatttttttttaatctatctgtcttagaggagaaaaaaaatactcataattggggtgcctgatccaaagtcaaggcagccttgattttatctacatgggcctagaggtttcttgctgtgggaacagcgagctcctaggttggtgctgagtccctcagtgtgggaggataaggatgtttggtggtgctaagagagggtatgggagccacatagtaattgacctggcagaggcacccaagagaaggattgaatggtgccttcaattctgaaggagagttctaattgcttttgtggtgtgctatcatctgagggtaactgtgtgagcgcactgacctcctgacagttagatgtagaattattataggatgtgagccactgatgtgggggttctgcaaaaggcattttattagcatttttaaactaaaatttaaatattcttattgtggaaagaatcataaatatccaaaaggaacctgaagagtaaaatattaataaccactacaagttcacatgcatatttagatgtagatgctagacattctggtcaaaattgtcataagttctagacaagtccttgagcttcccggtgctctgactggttcccactgaaaaccttggaactgatatcacagtgagctctgtggggaaggaggagctggtgaaagcagagtagttgtcactgcaaaccaactgtccaataagctgagctttgacacttctctatgtcccctttgggaggcctaggcccccaccgcatgcaagttcctttcctggaacgtggggaagttggctcgcagtctgctttggcacacctcctaagctgtggccaatatttagccaccctccttgaagtctccattctgtgccaagggttccatagacctcgtggccttggccatccattcataatgtcctgtgaagcaaaggcccaggctgaaggtcggtgtgtgtgcatggggccccgacagaagcatgtttactgagctgttgtgctccctgcacccgcagctccgaaatgacatttcaggaattgaattaccgacatttcagtacttgcagaatccaggaatagattatttgattatatctgttggaagtcattcccacaaccggctttgctttctcagccaacagctaaaccgagtgaggagcaggagacagcaggaggaggccgtaattacgtggttctcccaaaagcacatctctcaggctggcagcagctggtggcttgtccctggtctgggaaaaccgctggactttgatacgacaggcctgacccaaactggcaccacgttctaacaggcataatatcacatgctagtgcgggtcacactgctgggcctatgcagactaaaaatgccattttgatggctgctattgcagccagaggcacctccctcccgctttgtagagaaagaagtgggctaattaggtctgctgggtaaagtcagggtatctgtggcctgatttctgcaacaagtcctctagaggttgttggtcttggggttccaatttttagggctcaaaagccattgaggaaatctctgattttccttggcctcaaggaaaatatgaaagttccaggaggtgtttcccagcccagcaacaatgtctccctttggagctagtagccctgcaacagtgtcccctttgaagcttgcagcctgcccggcctgagatgggaacatagatacttggtgctgctgagttgaggcactggctttctgggtgcttcatggctggaactcactgagagccactcatgagcattgacccctgggtcaagagcaagtctgtgaggaacagaagagtgtgcctctccccagggctcccagcacccagaatgagctctggcagggcctgatggcagtctaagcacagtggggagaactttgtcccttaaaactatcaccatttgcctattaatcaaataataattactaggttgtgttttgttccaccagggaaagccgaaatgagctctaaggaggcacaggctccaccaggcaaggactacttaattcaaagggagaggaagggcctgtcctcattaggccacccccagtgtgtccttgaaacgtacttctcggcgtcctggaaaaaacaactctcttgtgcaggcgcctacctggactacttatctctaaaaaggacagagtcaggcctctggagtggttgaactcaaataccgtgctggcattccgcccacaacatcttttatcgagccctggaagcccaggtcccgtttcctatctgaatcccttaatggcctcttcctttaagtcctagggaactaacttcctggttacccatcatctctagtttttccgcttcctctcatctgtttcccatcatttctggagtaggcagggcatcttcatggtggaggttggaacagagaggctggtgcctaagggcaggtgtggaatgtggctgagggaggtttggggattcgggtatctagtctgtcttgacctgaggtgtttagtgactttgtctcctgctgtgtaagacctctgactcctcagagttcatcagaagaaatgccaagcaacagaggcaagtgtaggcccagttccatttttgtctcctgttccacggcttggcacctcaggattgaatggtacctgtgggctggcttgctgctttgtgaagtctggatactcaggataggctctagacattgaggtgagcactagccatgacctgaggagcctggccaggggccatgatccaagggatcattgttgaaaactgttgaaaactctcagcatgcttttctgagttatgtggggccctgtccctgggagtcaggtagcaaagatgttagggaaaacatgtgctctggccttcatctcctgcctcagtttcctcctctataagggaaagtggttgtctatcttaagtcattcagaatggaacctgtcactgggctgtaactttgctgtggatccaagatagacggtacatttcaaactgtagatcccaggcaggagctggcacacaggagactccgggaggtcagtggacgtgaaggggaataagtgatagaggcaaagccatacaagtgggaggggactagcagatgacatacacttagtagagggtggtagggtcctgtgcttgtgctggggtgaggtggaagggtcatgtgagtctggtgggctcttcacttggagggaagctggtctgaatgcaccagcctcttagaaatggccatagcccttgaaccacatggatagtcccgcaggagtccacatctgtcttgcaacctttacagtgcttccggtagcttttctaccaggtcatttaccctgtcaccttctagttagttctctgtccactgcactcagttccaccggggctcagaggcctaggtaacagggcacttggttcttatacaggagggagactttctgagcagcatagccccatgttgggtggatagcttaaggtgtggtctcacctaagggctccaacaggagtttccatgaaactaagtctgcattaaaggatcagtggcagggtgtgggacttccatgttctctctggggctgcgcaacactgcaagctttgacctgagcagccttccctgggacttttgtttaatccaatgcacatggatgctttctcttcacagtctcctcctcctatctcctggagggctcccctgaacagagaatgagaaccagcccagtgcgtcctcgggcaggctctcccctggatggcagtggtaaggaaacaggccttgcacaggtccttgtgggcctgaggtttctctgctgctgggctggctctgggatcttttatcaccattcagaaggtggttatatggtggttctggaagaggcaagtccacctgcctcttccagaagacatcatcttcaaagatgaaagaatgcacacgggtgtttccttggctcatagtcactcctaggaaccttgttgtcactgttggccatagagtgagggtatagcagtctctcaccaactggtccagttgtagttttgctttataatctgctcagtcttccaatgatgagagaaatcaagaccatctgctccctgtgggctgaagcacaggagggaagctgtgtagtgctttgactgtgtagcgctgacatggagagaacttgatcaaagactctactagagtgtagcagggccagcagcgtgtgctcaccacacactctatgcatccctccaggcactcggcacatatcccgtctcgatattgtatccagggtggtgggcttaacactgggtgaggtttgagcactcagaggctcccaggtgggaggtagatgatcgagcaagtgctgatccaggggggcaagtgctgtcatgaaggcagggctcagtaataagtgtcacatgctgctcgggacacctgcacctggtagtcttccttcccatctgcctggatatcagtagggctccctcactcctgagcatctgggttgccatcccaggtgcttcaggtagtgtccgtttatagaagacacaaagacagctcccattccccacctaaggactgaactacaggtggatccagagccactggtcaaagccttggctccctgctttttcctggctcttatcacactagcgaccctaagaggaagcaatccggtgctggggagcctccttccccaggccgctgcaagctctccccagctggtctgctctgacacaggtgcagcatcaagaggctctaagggacatagtcagtgacagatgagagcagcaagccccagaaccgatggaataatcagaagttcgttgtaggtgcctggaaagaggatggggtggtggggtggaaaactgattctaggcatgcagcgagcagagccagatccctggacagggatgaggagctactggggaaactgaggcacgatattgaggaaggtgtgacacaagtctcaggccccagcaggctctctgcttctgacacccgtgccttccctccatgaataaagcatgaggctggttggggggggggtgttgctgtcatcattatcatctgactccataatagaaaaattaaaatttaaagtgatggaaagtgacgagtgacagaaatgttcctagaaactggagattgtgcgctgagtggctctcggtgaagatgacatcagacacccgagtccccaggagtgggtttttaatgtttcagtatttgaagccgaggacacaggagcctttgttctctgggcccctgggggccctcagttctcactaccagccccaagaagcaacttcatctcaccatggtcctatgctttgtgatacaggcctcctcaggggttctagccaagcctacccatgccacctatggggacccatgccatgctcatgccagaggaagcctaggccattaaaaagctaggtcactaaaagcctttccaaattgtctctaaagttctcagccggaatccaatatttgaaccccagggtccttgggagttttgactccagactcacttccttcctggggtggctgcaggtccacattgtgatggatgttggctaccagctctggttgttagttgtttcaatgttttaaaaccaggtctcaccagggctacagagaaaccctgtctaggaaaaccaaaaaccaaaaaccaaaaccaaaccaaaacaacaacaacaaaaaaaacaggtctcgaaagccaaagccactttaactcttgtgtcccccctcccctgttctgcccaatcagcgttgggagtgcaggtgtgtgcctctctgtccagtacagtggtctgttttcctactagggctctaggaaaatctaaaatgtagccaagtccttagtccccacccactcccaggagctcagagcgacctggctgggcctgcccagttcctcagggcaaccacttgtcttccgctggcctgctgggctccaaatgttactgggcttcttccaaatcctctgctcctccccccagtcaagctgagtcctcaggtcagtggggcagaatgccagagctccagggacaaagggctgcacaaaacacttactttaattagaagaattatgtaaaacagatcagaaagttggcaaaaatataggacaaaaaagtcactgaaggctacctcctgacccagccactcgtttgcctcaccccctggtgatttcctcacagaattggcttgcacaccagagaggtcactatggccagccttctcgagaaggctggtgggttatgggagacaccctttttcttggggatgagacagtttgtctgcctagatggaggcagtaagtggcctcccatttgcagacactgatgtcctgagtttagattcagaacaagacaaatactaaatgtcacagttgcacagagtgaagtgggagtgagcgggacagctgaggtggtttcttgtgaaggagcaggtgtgaggtccagggagggattaggagagaggagtggggcagacatctggactcgacggcatggaatctgtgcccgaccacttccttcctgtggtcatccccctccagaaatctggaatcttcttgattattggtgtgcaatctgcaagcctcccccacccccactcgaggagagctgaagttctgtgagatgtggatttctggaacttcactacccggagctggaccatggaccatgctgctgtagggaggatggaagtgtggagaggggaacagcagcaatcatgtgtgaatggttccacaggccatggaaggactgtcagagttctaggatggaggggtgctaagccctccctcccaatgagctgtttatgatgagcaaagaatgctggaaagtagaggaggaggaggggggagggagggaaggaggaaaggagggaggggagnnnnnnnnnnnnnnnnnnnnnnnnnnnnnnnnnnnnnnnnnnnccagcaggagctgggctctgctctgtccaagggctctctagtgtgggtgcttactcccggagacccgtgaccttatccttttcttttgcttaaagcctgccttttcatctagtaacattgtatccctccagagaattcactaagcaggaggtgtaggctacaatctgtcctgtctccacgcctacactcccttgggaggctgagatagatttgagggtacttgcgggctttgatcagaggccagagctgaggaggggcagttgtctgtgtgtgtgaggaaggcagagagcatgagtccagcattcattcctgtctcatgccctttgagacactcaaggcaaagcggttagggaaggacacaaattgtactttttttttttttgtggtgtggctgttgggacagattcaaatacggaagtggcaatcagacctggatgtcagccccgcattttcctcttagcagctgtgtgaccttggacagctatccaatctccagactttactttcttcgtaggactggacaggttcaccccttcccactgagtcaaaacagcaagccacactcactgtaaacaaagctactgagcacaagggcaccaaaacagctgccttcttgtctgccttgttttatatcttataaacacacacacacacacacacacacacacacacacacacacacgagagtcaactagaaatccagcaattaataagtcgggagagtaattgctaggtgataaatattcatatttgctaaaccacatattagcataaatttaaaagatttctttctcctgctaaaattgttttgggtagttacagagctgggtacatttgtcaaaactaaatggattgtacacctagaaaggatgaaatttattgtaggtagattcaaaaattttttttcttagctgggtatagtgacacatgattgtaatgctagcaatgagggagctggggcaggaggataataacttctaggctgatatatatccctttttaatgcaagcaaaaatacatggaattgacaaagtaatttaagaggatatatccaatattgatgaagaaaaagacatctaatgttttttttttagattttttttaattgtgtgtctgtgtatgggaacaggtgtagcacacgtaagtataggtgtccctggaggtgccaggtcctttagagctggagctctaggcaattgtaggcaactcagcatgggtcccagtaacggaactagaacctctgctagagctgtacgcgttcttaaccactgagttacctctctagccctgacatctaaatagtttgctctgttgaccaggctgtccttgaactcacagagatccatctacctttgtctcccaagtgctgggaccaaaggcaagaaccaccgcgttcagctttgtaaacagaacttctaatggcaagttttaaacatatttggacgtggacatgacttagtccttcctattctgtggaaggccactccttatactcctccccagagctatcagggcagtggacaccaccctgattctcctcatgggaccttcatagaggctgtagtgtgcaggcagaagcaaccctaccgtttcccagagacaactgcttcctcctccttcctgttcctaaagcccctcatctcatcacttgtctgtcaaaaacactgtgaagatgaacaaaatgtggctcatgagagttgctttggagagaaggggtttataactacacactgtccttgaccccataaagtgagggacttgtggtgagaccctagaggggacacacactaagctcccctctggggtgtggatgaaatacttcaaattccacaaggcaatcaataactggtctttcctcaatggctgctgagcagggctcagaatggcctcacagttgagtacagcaaccctacctgtctctcaactggagagctgttcactggtgcctggtggtttttgcttgggccgcatcagcagtttcagcctctacctctgcgacatggcatactacttatcagattggccagggatgggaagaggctggggagctattaaaattccagaagcattagtgggttgagaagatgagacgggaatgtgatagggctaacagcagacttctcactgtgcttcaaacatgtagtcacccattcatgagaggacaggtgtgagaaaaactaagacccctggagacttgggggacactcagaaccaacactctttctcagcacatctgcacaggctgactgcagctttgagtaggaagctgaaacccctgaagccaggcttccccaggacagatatgctcttctcattgtaaggatggacctgctggcccaagtttacctggaggtccagacagaagaatacttagctcaaccaagccctgtgcatttttcttactgcatgaatgccactgccccaaagagctgttaatcaggctggctgtgagcctacccttttgccactgtaactgtactttaaaaactccagctgtcactcagaaagtgactttgctggctttggagacaccccagcccatgatctgggggtggggagactggtgggaaagccccgtgtatgtcctgagaactctttagcttgaggtctggaatgaacagggaaaaaagaacctgctggggtgaggcattcagtgagctttgctctttgagtctgtgaagtgaggagttcctgggcctttcatctagctagctctgctgagaaaagctggtaggcactgggccagaggcttctacccgctgaggtatgtttttgcccagggagctgagtgctgaccgcagccgcccactgtctgctgtgtattacaagccccagcctccccagaggatgagcagagtcctggttgagtgcaatacttcctggaaagttcctgccaggactgcatgcaccccacacccagccttctcatattcatcgtcacttactggctcttactggaggctctgttatatgtcaccttctctagaaagctctcctggaccctagacaaagttgaagctccctctgtgacttcttttagtatctatcacctacccagggcccattgccatttgacccagaacctcctgtgccctttgctacaagcagcataaactcttagggagcaagaatcacccttattctgtgttacattctggacactcaaagcagggcctgacacatggtggaagccccattaaacgtgatgtgtaagacttaaatcacaaatgagactccacctcctgcccacagaccatcaccttgatgaaagttcaactatggtggcgtctttgattggttcccctgggtcactgcttatgtggggcagaggtagtccctaaggccttgtaggagcagaaagggttctctatgctagttctgtctgagctgtccaggagctcccctgtggtggtacttccagaatgtacatggagctgacacacctgcccggtgccatctgaggccagctcatgtcccaccatctcagctacagcactgttgatgtttgaggctttgtagtttttaagctggtgtagactgttgtatttatgtaccccattctcttcacccattgccacgtttccctctgagaagcacaacattacttttactgagagctgctaacatttaaaaatattattattatatatatatatatatatatatatatatatatatatatatatgcatacttatccatatgtgcacacatttccacctacgtgcgtgcatgtgtatacatatacataacacatgcctttttaacggtagctctggattggcatgtttgctttataccagtttcctgagatttgccgcaacctgtgaggcatttcttaatcacatgtgagccacagacaactttggacctccactcttgagggtggggctggctggaagatcattccttcagttacacacttacatcatttctcacataaggagtaggcatgaggctggatgcagccagtgtggcaactgcacaagacctctcgtgggagcttaaggacagagaggtggaattttcctccctgtggagaagatgggtacaggctcctaaacctggtgggtgctcagttccctgtgggatgtcctctcatcctccccactgcaaggcagaactctgacctgttctggacaggtgaaaactgggtggggccttctttgctttctctgcccagaggtgtgctgggtgccaggcagggcactgtcctctgtctacactagtaccttgctgcaaggctacacttgctattcctagacagttaagcgatgccaccagtgccaccagtggcaaaaaaggtgaagggaaagtgaaccttgtgacacataggaatggggtagggcagcggctctcaacctgcagatcttaggaacatccccccacctcccatacatttattttcactactacttcattattgtgattttgctacagagtggtgtctcagttcctaagaatgttggaaataagtcttttctgatggtttcaacctgagggttgagaaccactagggtggtggggtcaggtgcttggggcctccctggaaggaatctcaagactggcctgaaggagaatagttcattgagaaactgggaactgttctgggcagaggaaattgtcagacagcatgccggagcttaaagatggtcagtcttggttaaggcacgagaattgttttgtaagtgaacttctcttcttcccactacctgatgtcctgacctagggctgccagtggtgcatggggtgaccccagaaccgttgcacctcctacagcggcctcagctcatgtggttgggaatctacatgggaacaaagaggggctctaggcttctttcctggcgggggccatgtgtgtattctcagcaggctctgaatgcagctgattccagggagatgctgccttccacagggaagctacccctgtggcttgaagcgggctatattagctgagccaggctggtttaatctgtgatgctgaacgtaccatgtggacagatcctggggagctgtcaagatggcgatgtccaaatcctgtgtctgcccatgcctgagtgactgagcagtgtcaataacaggactcctgtctttggggtgcccgtggtgaggtggctgttgtgtaaatgtgaaggctgctcatttgaggggaatgaataatttatttctgttttcacatggcttatcccttcactgaagctgagctcctgtgcatcctgcaggatcctgattaaggggcttctggcagccttaatcccagtctttgtggtgtgtttccacgtggtcgcttcccaagctacatttcaagagtgtctttgtgcatgctctccctctccctctccctnnnnnnnnnnnnnnnnnnnnnnnnnnnnnnnnnnnnnnnnnnnnnnnnnnnnnnnnnnnnnnnnnnnnnnnnnnnnnnnnnnnnnnnnnnnnnnnnnnnnnnnnnnnnnnnnnnnnnnnnnnnnnnnnnnnnnnnnnnnnnnnnnnnnnnnnnnnnnnnnnnnnnnnnnnnnnnnnnnnnnnnnnnnnnnnnnnnnnnnnnnnnnnnnnnnnnnnnnnnnnnnnnnnnnnnnnnnnnnnnnnnnnnnnnnnnnnnnnnnnnnnnnnnnnnnnnnnnnnnnccccctctcaaggaccagcctcagcctctgcctacattgctctcctgtctcctttgaactctctttggcaaaggccctgatgcatgccctacattcatcctgcccaggttatcatcctgatgctcctccaagttcatcgtttaagaatccacaatggcttccaactaccgaatgcagtctgaattctaatattcaaaactgatagtaacttccctggttcctcctttgagctgcctgctgattcttcattcaaagtttaagaagggtcttcttcatctaggaagtatttggggacttgtggacccaggattaaggaggtcccactctctgactgcacaactctaggacaagatgatcagcactgaaatgacaggacggcctgtcggatggcctggtcctggatgggagttgagggaaacagcatggagcatgtcatagcatgtgcatgtgaatgtgcccggcacaccgtcctgtgcacagcgggaccgtattcccagccctttgcataaatgcccatggttgagagggtgtttctatatggcttcattgcctcatgtggtctcatggctaccaaaggaaggacagagagaagagatggagaagaaagcagttcctgagggagaggtgactgtccagggtcacctagtgacataccagagtccagaatcagcatgttttagattcctaccatgttgaagggttcacccccaacttgcccttcacattcctggtactctgagaacctactgtccctcagccacctggggtggacttaggacagccactcttagggacactgtgaacattgtgctccctcttgggctataatttgtcccaaacctaatacccactttcccctttctcctccaatttcattactaataaaactactggaatatgtaacagtggcactcacagaggcctgtggccctggcttgagtgacaggtgatcactgagtgaccacaggtggtatcacaggaacacttgggacctttttgtcactgtccgacaaataaaagcatctgcctctcccgggagttttgcttggtcatgctgccacacctggccacactggcctcacctgcccacttctgggtatatggcctggccagacctggcaattctggtctttcagggccactcctggccatatacctggtcacacctagctctgtgatttaggagcaagactcttttctcttgggatcctttgtacaactgtaaaatggcagagctgggccagtcagatgttttttcttctttgctttacccagggaagcctcagctaaatgtctcttccttcctatcttcatgagacttgctgcagaagttcaattcctggctgagacaggagggaatcccttcctgtgggcaccactccacagaagcagaaagtgtcaattgggttaggagacacacacacgcacacacgcgcgcacacacacacacacacacacacacacacacacacacatccatccaggtccaccactatttccctcacagctacttcactgttctggtattggcaaagtttttcaccatcttccttctggagcaggagaacccttagccacttcctgggaagaatgccagaatgggtgtcttatggcctctggtccagggtcagcagcagcaggtagtcatggtgggaggtgacaatggctctggctagggaagtcctaggacatctgttatgaaaaatggtctcctttatccccactctgtggaaggtgatgtcatccacctagtgagacaaagctggaaggtctccattcgctgctactctggagtccacaggctcttttcctctggtgcctggtacttttgcagtttctagaacaacgttgcttaaaatccgagttcttgggctggtgagatggctcaacaggaaaggattcccaccatcaattcctaagctgagatccatcctcagggctcacatggtagaaggagagaactgactcacgaaaactgtcttctcccttccacatgtggccatagcacacatgcaccctcaccaaatacacacacagacactatacacatggtgcacaaacatgcacactacatacatgcacatacaaacacgctcatacacactaaacacatgcacagatatcacatacacacagacacctgcaccctccccaaacacacacacacacacacacacacacacacacacctctaaataaataaataacaatttatattttaaaaaattaagaggaaggcccacagtgtgtaagtcattcttggtgttcttcaaacttgatgcattgcgttgctaattcagccatggatgtattaggaggtaggggcttcaggaggtaaattacatcaggaaagcagacctctcaagattggattcattcccttataaaaagaggaagagggcctcctccctaccacacaagaacatggggatgaaccaggagagaggtctcctcagaacccatacactggcaccttgaccttggatttgcctcagaactaggaactgacagtgtgttgagctgctcactctctgggcagtttattatagcaggctctgaggcatgtcaactcaaggcatgtgagcttttgtgtctggctttgtctgtgtggttcggcatctccgagaggcattctgatggccttagtgtttcattgtgggaagacacaaaactttgcaactggtaaagtggagatggatatttggatagctagctttcaagttggtgccggcacatgcatacccacccgtctcagtgcatcaaggagctagacccctgtttcatggagaatgtgagtagcagataacccagtctttcgaagtgagcatagacagcaggctttgttgtctacttgcttgttggtgttttgagtcaaggtcttatgtatcccacagtggcctcaaacatgcagagtagctgaagatgaccttaaaagtctgatcctcctgcctcgacccgatgagtactgggaatacaggtatgtacaactatgtctagtctgttcaacgaaagggattaaacccagtccttcatgaatgtcaggcaagcatgctaataactcagccaacaggttgtgggagttcaagcaagagctaggcactgcatagattttggagttgggaatctttatgtgctaatttctagtgctcccagaccaaggctggaaacactggtcactggccatgactgtgcctggctcagggctgggttcagcttactgttaagcccagatgcccttccaccccctccctgtcttgtgaagtgggcaatctgagtggtctcatctagatttggctgccactgtgtgctgtggggtataagccaatgacatctgcaggatccatggtttccttaatgactccattgttttattatttattattaatattactattgcttttttgttttttgagacaagtcttccaacagtgctcagactgagccaggaactatatagctcgggctatactgtatagcccaggctagcctggaactgacaacctctcttactttagctttcctactctagggtcacaggtgtacgccatcatactcagctctaactcagtttcctgagctgtgcaatgaaagaaatgcctctgcacagagaagttattgtctggatagtatttgaagatattctgtgagccactgtgcttattacctggggactgtggttggatgagtcattttaaaccacgttcactcaggagtagtcataatcccaaaccatccatcttggacttcagagcccacaatatttttttttctccctaagggactctgcttcctaattaagttgagcttcagaatatattaagacaatttgtcatctcttgagcacacatccgtgggagcgggctggagaggccatttccgggttctctgcaggtcttggaggtagtgtgatacattgcctggacaggagctgtggctgggagctggagggagacttctccagctgaaggcaggcacaagggaccttctaggtctaggccatccggaggctcctgccacagaaacaggcaaggactccaaaaagtcttaggctacaactgcagtgctgtggattcagctgggctgttcatgtgactgatctgagacctcctcggctggagcttcttatggaccatgtatatcttgacaactagcccttgtcagcacccccagatcctggagcaccccttaaataaggaggatgctgagaatatccaccagcatgcctggtgtcaggcatatatccaagtgaacctactgggctgtgcgcttcccacaaatgtggaggtgaccctggacacagtgcacatgctggccctcagcctggggacccagcagctggggcccccaaagtactgttctaactcagactaaagcatgttcttcagggccgtgacctgggtatgacgctgcatgttctcagcagctcaattgacacctgctctcctttttctgtctgagaaggatgatggtccagcactagggaatcaatgtggtttgtctcattgttcccatcaccctgttctttgtctttttgccctctgatgtagaaatatagaaagacattggcttagatttcctttttgcttttagtgggtgtcttagtgaaggatactgagatggaactccatgaccaaaagcaacctgagaaggaaagggtttattatcttccacatcacagttcatcatcgaaggaagtcagggcaggatttcaaccagggaaggaacatgaaggcaagagttgatacggaagccatggaggcaggagctgatgcagatgccatggaggggtgctgcttactggcttactcctcatggcttgctcagcctgcttcctttagaacccaggatcaccagcccacaaagggctgagcctttccccatcaatgtattaaggaagtgccctacagctggatgttgtcaagctcagttgaggttcccttcttccagataactctaccttgtgtcaagttgacataacactagccaacatactgggttttgaagatacggttgttataccctaaaatttaccatgtcacatacataatacaaagtaaatgtagcacatataattcagttgttgttggtctcttcacaagtattagtcagttttggaatgtttcatctctgtagagcagttattctcaacctgaatcccatgtgggggtcaaatggcccttccacaggggtcacctaagacatagatatttacaattcataacaatagcaaaattacagttatgaagtgcaatgaaaataattttatggttgggggtcaccacaacatgaggagctgtattaaagcgtcgcagcatcaggaaggttgagaatccctgatctagaagaaaccccaggctcctaactacacccttgtttccccagctccaagaactactaccatggtaggtgagatagtttggtgagcaaagggtctcatttcacacctgaacttaatccccgggaccaactccccaaaagttgtgccagatggttttgactgtatgtgtgggttcagttgattggcttttgaggcatggggctgaaccttaggctttgctcatgctaggcaggtgctctgtccctgggctacatcttgcagcctccaatgcatatgtttatttctggactctcaaacccatttcattgctctgtgtcggcaccatgccaccctgacttttaatgccttttagtaaactttgcacttgggaggtgtggtacgtaggtggctcatatggcttgctgcacaattgtaaggatcagagttcagatcccagaacctacatcaaatgtcatttgtgcgtggtggctgtgattccagggctccggagctggctaccggaatgtgctgcttcagtgagctccatgtctggttgaaagcccaagcgatagaggaaggttcctgatgtcaacctcaggcctcacatacatgtgccttcacacatgcattgtgtgtgtgtgtgtgtgtgtgtgtgtgtgtatacaaacactctacacagacaaaacacaaggaagattgggaggtgcgagtcctactattttcttctttttttttataactatttttggctacttcaggtcctttgcaatcccatatgaattttagaatcagtctttcattttctacaaagaaataaagcaggtattcaaataggaactgattaagtctgtggatcagtttggagagtgtccagcttacccttaagtcctatggcttgtaaacagacatttcccccagttatttagatctttcttgacacctttcaacaattttttgcttcctccgggtgtggaaatgcaagctgataatcccaaaactgtgcaggccgaagccagaggatggcttcaagtatgaggccaggctggactacatagcaggtcctaggctagtgtggactatatggcacatatagcagaccttgtttttttttgttgtttgttttaataattaattaatttaagcaagccaaagcaatgtcttgttatttccagagcaggaattttgtactttttattgagtattttttcccttagagtttattctgtttgatgccgtttgtttgaaattgcttattttaatttccattgtcattatcttcataacttgatttttgaattgcaaatttctatccatagtcatttttatctattgatcttgcctttagcagccttgttgaaaaatgttataatggattcatcaagggtgctaattatcaaatataatagcagaaaatagaaatgatatgctccctccattctcataataaatatctttcatttttgcattttttcttgctttattgtcctgcttagaaccatatgatttggatatagctgggaggtagctcagtggttaaagctcaaggaccagagtttggattctcagaacccaagtaaatgccaagtgggcatccttcggtcccttgtaatgacagcaaatagaaaatttgagagcaagctggctagcaaagctagctagacaggtgtggtggtttgaatatgcttggcccagggagtggcactactaggaggtgtgtctctgttggagtaggtgtgtcacagtgagaccctcctcctaagcatattccagcctgtcttctcccagcaaccttcagacatgaaaaagagaaaaaagggcaagaacaaccaggcatccttatctgattcttcgtggtaccaagcatgccgctattaatcgtaatgttagcttttgttgttgttcatagatgcctttcatccaatgcagaggttctctcttgtcccattatctacatataatgttttcattatataagggcatcagatactgtcaagtgcttcttctagatctgtctgggtgagcatgtgactttgggttgttattgatatgatacactccatcagaacatgtagaggtacttcaggcagcctttgtcccacagtgcatgttttggatgctcagaaccaaggctgctgagaagtcatacaacacataatgcaacatgtatgagccctccaggaacacctcagatagtatatgtttgattctgattcattttttggtcattgcatttggtttttcaaaccttctattgccattttttttttcaaccatcacactcagtggctccttatgggattgtgacaaacggtttaaggagctgggtgttagcctacaagatggttcagtgggtaaagatgcttgccaccatgcctgataatctgagtttgatccctgggatctacatcattggaggagataaccaactcctcagagttgttttctgacctccacacacataccttagcacacacgtgcttatttatatagtcacacatggagacacaaaaacagataaatgtaataacaacaaaacagaagttgatcattaggtcagttggttttcagatggtaaattaactaagcttgcattcctgggataaatttcacctggtcgtggtgaatgatccttttatacgatgctgtgtgctgttttgtggtggaattttgatcagtatttataatgagaatggctcaggacttttatcctcctaggaagtgtgtctctggttttgtgtcactatctgatgtgttaggaagcacaccctcctgggggctctctaaaggacttcacatctttgcagagctccgctgggaagccacctgggtgtggagttttcattgtgggtaattttctctttgcttattccacctcttcattacttgagtctgtttgtaccttttcttttcttcttgacaaattatattagctacttttctccttgccctgaccaaatacccgaccagaagctactcgagaggaaacatttatttgggctcactgtttgaagggatacagtgtaccctagtggaggaggcaaggctgcaagggttccaggagcttgctcatctggatagatcaggaagcagagagaggtgggtaggagatggctccaggttgtaaccgctaggcctgcccccaacaagaaaaacctcactcctaagattctacaaccccaaacagggcatcagcttggatgtgttcaaacatgagagtgggaagagagagggtgtcagtcagaatactacaccatcaagtcagaatacagctcttgttttatagcttgagctggccagactcacagtcctatccgagtgctgggacgacagggcaccacacttagctaaaaagtgtgccttttcagttggcttagaccctttcaagcttcctcttgcccttccagagttggtatcattgagttcttaggtgagagttggatttttttttgtttttgtttgtttggttttgtcttttgtttttggtgcactaattcataattctaacaagtaggaagtgccattattttgtctgttttccaaatgtgtagaggaaaaaggagaagttgagtagtaacaggttggggtcacctaccaggaacaaggctctctctgcctgtctccttcccttccagctgtcctcataggtagatgggccacgggtggccccagcctaccttagttctgacagacaaaaaaggctgggctccaccagagaagcagaagttcagaaagaaccctgcaggagcctggggctctggtgcaggagccctgcctggctgtgccttttgtcccagcccaaaggctctacacaatgctcttccccaccagggtgcccatgaatccttggagcaacaagaccttcctttgcctcaggctctgtatgactcactcacccatctctcctccagaggaagagacaatctgtaagacaaacgcagacagaaatcaggatccactagacataactcaacataattattcccgcctaatgacttctgctccttgagtccatctccagcaatgactgcaatctttatctgccattggaaagctggtagccagggagcccctgcagctgagcgataggtctggggagaaatttgcaattcatattaatggagtgttcacaagcagccttgagggtctctggaatgtagggctgtcttacaaggaaacctgggatcagagatggccatttgagaccggagcatgcatgtcttcctcaggaattcatctcactcccttgggcatgttagttatactgtaacagaagacacagccagcagagcctgtgtcttgaaaatttccctttatcccgtatctctgttcagatacagccagatctttggtgtactccagaaaagaatttcaggacagggcagtatagaaacagactttgactttattaaagggagtttttattttgtttgttttcttttagaaacaggatctgtgtattccacactggccctgaatttctgatcttcctgcctccacttgccaaatgatgagattatgggtgtggacagccatgcctggttttatgcaatgctgaaaactgagctaaggcccaatcatgcatgtcagagaagcctgaatgagctataccctcagctctaacaagagataggaggagcagggctgcagggttgacccaataggtagagggcttgctgcacaattgtgaaggctgagtttgaattcccagaatatatatgaaaagctagatgcagttgtgagcatgtgtaatcccagtgttcctacaaggagacaggagaatccctgacactcccaggcctgtgagcctggcctaatgtgaagattctacctcaaataagatggaaggcaaggaccaacccgtaaggttgttctctgacctctgtgtgggcaccatggcatacacatgaatgtacacacatatgagcatgtgctaaataagtaagttagaaggaggaatgctcagggaagaacaacgcacaccctgtaggagagttcactcccatagctttgaggagtcctctgtatgattttggtggccctgaagttacatctttaaggggatcctgaagtgcatcaggtagaattacagtctgatcaggtgactcggggacacttaggttgctcttgttgtgagttagtaatctttcaagacagggtttctctggctggcttcgaattcacagaaatctgcctgcctctgcctccagcgtgcagggattaaaggtgcttgccgccatgcctgagagttagtaaattagtaatcttgtttgtaagatttttcagaaaccatccagagaggagccagagcatgctcagggtcacctgtgctccggccttcctcatggttcactgctgttagcgttcttacgggaaacatccctataaaagaaatagtcttctctgtgtcggcaccctctgcagcaggtgttcatcaccctggaattcttggttcccagcagggcagaggcttcatctggactctcagcaaaggagccattcctttcccactgctccatagccttctcttttttctatccttcctgttccatgtggctgaggtcacacggtgtgcccaatgtgtgtcaaaggtcacttagctgctgggcaagcttgaaacaagaacttaaccatggctctccccagacccagcatgtcccctttaaacctgggaacctctctagggggacaggggatggctgatactaagtgctttcttggattgggtgtggtcccctgtactgagctgggattgatgagtggtcccctggtggtccttagagctgttcccagaaggctgacattgggttttgtagctagacagctaagccacctccagctggttgagacaaggctctgtctagagcactagttctcaagtttccaagtgctgcagccctttaagacagctcctccaccataaaattatttttgttgctacttaataactgtacatttgcttctgttatgaatttaatgtaaaatctgtgttttctgatgctcttaggcgattccctgaaagggttgttcagcccccaaaggggtcacaagccacaggctctggagaaccactgctccagaggaacagaactgatagaatgaatatatgttacaaaagggatttattactctggcttacacaataaggcagtgtagtctaacactgaagaggctgagaaccctgtatgttcagtacatgaggtgcataccttagacgtctcagggtggtgttgaagatgtggagggttcctagacagctactgctcttgagcctgggcttggataggttagggctggagggaacatttgcctacatgcacttactggcagtgagggaaggcaggcaggcataagctgccctgtatctccattgctcaccctcagggagggtcttactccttcagttaatcttccaggaaataacccttacagactcacctacccaaaagtgtggtccagatccaatcaagttgacagcaaggattagtgccacaggcaccaatagcacagtgtctcaggaacgaacgctggcaggctggtgcttacctgctcatctcagggatggtagacacccgccccactccatacctaggcctgagtgcatattcacacccgtaaaagagggtggcatgcttgtttactgaatccttggtgattttttcactgaacccaagagaacttggaccctctgcaagagcagtgcacactcctcaccactgagccctctctccagcccacatttgtaagctctgtataggttaaagtgttcttcaagggagccatcttacttagtgctgttgtccattgttctcatttgttctcctgccccctccataggcctcctgcccactccagtaggttcccttcctctcttgttttgtcccttcagctttcatgtcatgtgtatcctgttacctcttcctcccatagaatcctttcctctcagactcccctttctagtttcaacacacacaccacatacaccacacacataccataaacatacatacacacatacacatatatgcaccacacatacactacatacacacacacacacacacacacacaccacatacatacattcacacatatataccacacctacatacctacacacactacatacttacattcacacacatatacacacacatacaccacacatacacatgcacacacaccatatacatacatccacacacacctccctttttgagtctggttcattttgcttgacaatgatttccagttccttctgtttctgtgcaagtatcatgatttcacttttcttcctgactgcatgaaatcatgtcatgtgtacaccctgtgatcaatttggttaacaagaatgaaaagcagaaagcagggcctgagcttttgaatttgccaagagtgacatggcatgtcccagagtctcttctccctcagtgagccccttggagcatggcccttggccaaggttgtggggaaggcagaatgaagaaatcactagctgacattgtatacctacttgcctggtgatttctgctgcaaccaccaggttgtgtgtctgatgaccttccacaggttccaccatttgcctgcactttgaccccatgagtgtcaaatcagaactcctggaagctattgaatctgggggctttgaaacactttgagaaaatatggacaaggtggagcacggggtatccgaggtcagtgaagctggtctgtatacattgtagaggacatggatctgtgaacccagaacatgcagctcaaagcatgaatgctgtgtaggctgtagactgagtgagggcaatgattgtccatgctacagatgccccattctggtggagggtgttgaccagatgggcccagggaatgtttctttgccctccccgcactctctctctctctctctctcagttctctatgaatctaaaactgccctgaaataaagtctgttaaaaatacatatgggacccaaggagctgaagggatttgcagccctataggtagatcaacaatatgaactaactagaaccccgagagctccctgggactaaaccaccaaccaaaaagaatcccatggctccagctgcatatgtagcagcggatggcctagtcagtcatcaataggaggagaggcccttggtcctgtgatggtgctatgctctagtataggggaatgcttgggccaggaatcaggagtgtgtgggttggggagcataggaagggggggaagtgattggtgattttcgaaggggaaaccaggaaaagggtttaataaaaaatgggcactggcagggtggctccgtgcttaagagttcttactgttctttaagcggaccctagttcagttcctcccatgttgagaggctcacagtcaccggtaactccatctctgggggatcaggtgccctcttcaggcctccacgggcacctgcactaacgtgcatattcccacactaatgtgcacacacactcagtttttcttggggcaagtgaagggatgttgtgagctcacccagatgccagtgccccacgtgacctgtggtcttctttcccaggggaatggtctagcagcttatcgagcctgtgcatcatcccccagcagttctgatcctgctctgctttggcctccatttggccgtaggtaagtcaccgtgaggccaataggcctacagagcattaggactgtggatggaaggggtggcatttgcagagactgtgggttcagtctcttcagtgatctcagaggacaggtcaggaaactgaggctgagaggtaagaagaaccctgtaagtacaagggtgagccaggcctacttaaccatgaggccggcatcaccaccattgtttcagagattgtgcatgtgtcatggttctttctaatccaaatggctgctccctcaagaggtctgcaagatgcagaggcaaatgtcaagtggtacttctgtccctggttctggtaaatgcagctagttccctagagacttagaccagcagttcccagcagacctgggagtggctgggtttccctccccccttcccccctccccccagctccagacacccaagctcctacagcattcatagagggaatttcatggcacagggtgtcctcaggacttcctgttggtggagttcctttctggccctcatctcctggagggagaggatatctcctgctgcctttttcttcactcccccacattccatagacattctgtccaggttgtcagtgagtctgaaggagatacccagaaagaggccattgtcttcaggtcccctcaatcgaaaatagacacaatggaatatggtgtgcagtgctgaggctaaagagagcagttcctgagtctatatgactgaatgtcacctgcatacatgcctccaggccccaggcctttttcttcactcccccacattccatagacattctgtccaggttgtcagtgagtctgaaggagatacccagaaagaggcccttgtcttcaggtcccctcaatcgaaaatagacacaatggaatatggtgtgcagtgctgaggctaaagagagcagttcctgagtctatatgactgaatgtcacctgcatacatgcctccaggccccagggtcctcgactccagatgccatccatgcacaagtgcatggtagggtccagtcaagcctggaaactgatgtctggaagctggagcagacaaagaggtcagaggagtacaagttctagcctatagtgcctcttctcatcctgaggcccttggatgctttggtgtacacccagtgactcctctgtagccaaacacacctcggcactgaatgaggagagtctgggtcagacagttcttccttatctgaggtcagcactttgccatggtgtcagaggtcagaggattctcagtagaaagatccctctgaagatgtgcacctcctccattcccaccgacctgcctgtggatgaaagcttgtacaagtctagggcacagccttgctgccagctgtccaccttagcaggcagtatggctgtgctcagcatgtattaagaatatgctctttccccagtaagcttgagggctctggcttctaatggcaaagaaaagcaaagtaaagcctgggccttgaactcattataatattggaaaaagtaaagctggaaagaggttgggcttagaaggttgtgtgtagaggcttcccttttcaacaaagtattccaggaaggctaagagatgtgagcaccgagagagcctgaagaagatgtgggaacaaaggtccagtggcagctgtagggatggagacagaagcagtggagatctgtgtggccagagaggattgaaggatggtttaggcagatgggagtgcaatgagtcacagcctgcagttcagagctcagtgtgtactgaatgacagctctggggttgtagataatgacctctgtttaggcctcaaagatcatctgtgttgcacagaaagggttctttggttaacagcttcttctagaacagcgtctttcaacctgtagatcttgacctctttaagggtcacatatcagctatcctgcatatcagatatttacattatgattagtaatagtaacaaaactactgcatgaattggcaatgaaaataattgtatggtttggggtcaccacaacatgaggaattgtattaaatagtcacagcattaggaagagtaagaaccactagctctagaatattctgggttaatggctggagattgggtgtgctataggagagagtagtttagctgacccaccctgtaatgatccctacctagagatgaccagcgtgaaaaccctaggtaacatctcaggcagcaggccatctttcctggagtagattcctgtggggagtgtcctggtcagagggtagggtgggaaatctttcctgtgttgaaagtcagggcttatttttaggacaacaatgacttggcagtatcaatgtcctctctaactttatctcgggaggttttgcctggagaacagtgttgacagctgtgagaacacacacagctacagtgagtgcacttgtccctctggtccacagtggaattctcagaggtatgggaaccagtgccctcacaggctgttggggaaacctaccacctcccctctcttgacaattgctttagatcagattcagtgtgagctgatgccctgggccactggtcagcaaagccagcttggatcttggctagctggagaacaatttaactgacagtcacctgggttccttgatcctaacagggactcctttgagagcttgtccattcctgtgggcaagaggtctggactctctcaaccagagctgagccagctcagatgcctcccacttagatcctggcctctccaggtggggtccatgtcaatccttttcttccctttcccgtggctcaccctggatacaagttcctgagttcctggaacaacccagatttccaatttctctctagttgatcttttgaatactcttggacttccctgacccagtgtgtcaactttcaggctagaaatactgaggacacatgagaccctcaacaaatgtttcactgtctgcaattgctggggtcttcaggtctccagaaagcccgctctttggctggagttaatactatggcttagaaaggaaggactgagggcttgggatacatagcatagctcagttggcagagtttacctagcatgcatgaagttctgggttccatccctagcatgaactggtacatacatacacacacacacacacacacacacacacacacacacacacacacacacctgtaatcctagcacttaggagatgaaatcaggagtatcagaaatttaagatcagcctcagcaacactgcatgttagaggcctgtttaggaaaagtgaggccctgtttaacaaaaaaggagcaggggttggtggggcaggctggaccagattctacagagtggtacagaagcatgggtgaggacagtgcctgtgggctgcagagccactgtcaatggctgggtcttcagggatccaaggagtgcccaggcagcttgttccctccctccctaacttccttcctcccatgaaacaattactgtggccttcctgtgttgtctgttaattggtcatgagatccgtcccagctgtgccctggggaactggaaaccagccgtgtgccctgggggtgggggtgggtgaaaggggagcagttggttcatcttgaaactcaacctctgtgtcctcaccctctgcccaccagctgccttgacactgtatttggcagaatgggcacaggctctatgttgaaggaaaggacccaggcctctcttgtgtagccagcagtgaatatcttacacagctttgcatgccccttgctttgctctgggagttcacatagtaggtcttcaattaatgcttgttattagagctttgcttagtaggtatgcagttaatgcctgtcactggggcttcacatagtaggcattcagttaatgcctgtcactggaacttcatagtcaggtttctgcatggctcccagaggctccatgcagaacctgtggcttctggccctgtgatcgcaagactcaaaatggccaaaggtagcttttctgagcttcccacaccattcctcataaacgttcccacctggactcaagactgtagctgctggggtcactgaggggccatcggcacatcccactcccctacctagcattctctgcaaggaagggagggagtgatgatggtttaatgagcatgacttctgttcttacttcttcccgaagacattagccacgagtcaaatagcttgtgagcaattccctggaggttttcttttgagcttaaagaagaagaagaaaaaacaaaacaaaacaaaacaacctaatttgtggagtgggtacagaagctatacttgtagcccccaaattcacaggggtctcttgccctgaggacagatccctgtgtcaatacatagctacctcatctaatatttaaggtgacagttctcttggttgacttctgcccaaggcatattattagaatgtggccgaagctcattcactgggggcacatgaattctattgctcccattcactggggacatcattcagtcagggacctgggcaaaatgtagctttctgctgtcgactgggagcagtggacctaccagccaggagggtgggaaaagaacattaatgtctctgaggggaaagagccctctcatgtaccatagcagactgctctgtggaggagtcgcatcttagagctggggtctatctgctcagggctgcactgatcaaaagcctttcgagaaagtatgtgcttcaagaagtgccctcccagaccatcctgaggctggcaatgttcaggatatctgggcttgtgcaagtgtttgaatctgtcattacaagtgggtatagatcccaggcctttacatctgttgcttcaggtttttattctggttttcacccaacttgaaccaaccttcaagaaatgaatctgaattccttgggtttgatggtatttatttcctctttctttccctagccttccctcctccccacaccctacatcatccgtttctccattcctctcttactcttccttaccatcccagactgctccgtgttgttcagctccagtctacactgttctgttattgttgagtagtagtgtgggttgtgagtccttcatcgtcccccttagtgtgcctggagaggtaacagacccagagttgggtagcagaaacaggcttgctgacagtggtctcccctaaaatctgagcctatgagctcttgaaacttagcagctgtgaggggcccctgagtctgaccctatgaactgccactcccgcccccaggtagatgtaccccaggtaacacatgtctgctctctctgtttcatagtgactcgcctctgagcacactgaggcttcctctgagcatccatcttccctgtccaccagtcagcatcttctccatctgcccagggttagggtcattcgctcagcacatcttcaggccaagtccatgcatacttggtaaaggtggctggatgaatgaatgagcaaaggactcatattcctgtgtgtaagaatagcgagttcccaggggggatatcttccggagtcctgtgtggtgctctgaggagtcctccttctaacagctcttcctcctgggctatcactgaggccaggagggatgggagcctctgagtagtcagtgaggtaacacatcacggtgttaggggaggggacttggggtgtgtgtctctaagcaatgtaacacatataacatgacgtgtgagtcactgcctgagggtccctatccctcacactcctattcctaagcagtaggcatggacttcccaggatacctgctgccatgagagaaggggccttcctcctcctgaaaccccacccctgtgtctagcaagcccttggtgcttgggcccctgtactagacctgcccctcagcaacaggagcctctgcggtccctgccctgatgtctgcctggctacatccttccttccctcccctcttttcctctttgaagtacaggagttaggatgtcactggccctacccagggatgcttccagaccacagtgaccccaggctctctgccagcacaggacacagtttttaatgccactgcagtaggtatgacctgcaagagaagcttttcaggtcggtggcttccctcctcacagggtgctgtactcagatggagctcattgaggaagcctgtggtctttcacagtaaaagtcctccaatgtccccaccgagcatttgcctggtggttcagtttctctgtctcctcatagcttctgtttcccttcctttcatagaaataggctgtaaactccacacacagggacctttgctcttggtttacagctaaggagacaggactcagagaaatcaaggtagcaagaacatatgactagaagggaaggctgtaggcagggattgacccagggaccaccaaatctgcatgtcccattgcagcctgacacagtaaactgcagctccttttagagagggacacacataggctcagtcaggagcaatgagagatattctaccctgctctttgcgaggcctggctcagcacccctgggttactgctggaccctcccaggagtgttgggtgctggccactggccagggcagcctgagtcattgaccatgcagagccagtcctagaggccccgtgccatttcccctatccactggggaaaggccattgctggcttcttggcctgcagcatcagaacatagtcccagccaatcaggaggagcccatgtgtgagtcattccatagctggctcaggaaccccaaagaacctgctgcatccagccggtggccaacgtgccaacctgagcctgggtgctgagcagcaaggcagagaagcccaggctgaatccatcccactacaagtgactgcacaagacgtccatctgtagagggactgggggaacaaattggaggcctctaaacctaacctgcttgcagtaatttcttacatatccttcaaaagaacacttacagcatactgtcttccagtaatttcagcagactgaggagtgtgttaagttcaaggctggcctgggttgtatagaaagactctatcatagccagatggtggtggggcactcctttaatcccagtactcaggaggcagaggtagatggatctgtgtgagttccaggtcagcctgtctacagagcaagtttcaggacaaccagggctacacagagaaagcttgtttcaaaaaaaaaaaaaagactgtgtcacatgaaaacgggagggggagggagaggagggaggataggctggagttggctacgactgttggtagaatgcttgcctaagattcaccgaagtctaaagtctgtccctaagtgcaccacaaatgcatgtggtggtgcatggctctaaccccagcccttgggaaatcgaggcaggaggatcaggagttcaaggtcatcgtcctttacataatgagttcagtgtccagcctgggatacatgagaccctgtctcaaaaccacaggtgtggactcagcccacaggaagaagagtgtataacacaggtgtctgtccctctggctcagccttgagcttctactgtatagtcaagcatcgattgtatcctgatattttgacttgctaattccctaaggtttctataaagctggacattaggtgaggaacgtgagggcctggatctgccctgtctttcatgtctttccagctatccccattgccagttcctagtctgcttgggttggtcatcttggttgtgctccatgttagctggctgacctctgtccctgtggggatactatcacttcctcattgggcagctgttgtgtgctgcagggcagtgagttctccttagctctggccctggcacacacccacacattgctttttgctttcccccatccaccgctgggaactggctgcccagatgtcctgctggtcccatacagaagcaggggcctgtaaaaggtctggtctggtgatgagcatctttgatgataatgacctcatgggagggaacaaaaagccttacttgggaccccatagctagattgctgtccaaaaggagggacatcagcatccggcaagtgaatacccctggtgtgacacattcctgagtgcctattctactgtcactattgtgccagaatggagctttctagaagactaattcacccacatccctcacattccttcctgagtccctaaccctggaggtcacaaagtgtttgagccttcaggataggaagagtctcttgggcctcatgctgagtctttgaaatgtcatgcagccccgattcacagttataaacagtgtgtgtaccctgccttgttttggggcactgtgcgggttcatggtggcaaagtattaaatgcagaaatgcaggaagccgcagtctgagaggtggagtgctccctgtgtgtaagcataaggacctgggttcagatccccagcacctgtgtaaagcgccacatatgtccttgtttgctgtgaccctggcactgtgggatagagacaacaggagccaattctagggtcattctggccgtctagtctagacaaaatggtgaatagtactctctaggttcagagagaggccctgactcaaaaacaggggcaggactctgaggcctgtagagctggctctctgcttacgaacaagtactctcttccagagaacctgaattcagttaacagcacacacatctggctctgtgagccaccagtaacttcaattccagagccttgacttcttcccgcctctctaagcacgtggcatacatacatacagacatacatgtcaatagaaaattttaaaacttttttaaaaagaaaaagatatctgggcagtggtagcacacaccttcaaccccagcacgcaggaaagaggcaggtgggtctctgtgagtttgaggccagcctggtctacagagtgagttccaggatagccagggctacagagagaaaccctgtcttgggagaagagcagagtaaagaaagcaaaaagaaggaaaaaacattctcatgtcaacctctatatcctgcatgggaaagcatgcctgtgtgtatgtgtataaaggtgcatgtgtgtgtgcatgagggtacatgtgtgtgtgcatgagggtgtgtgtgatggtttgtatatgcttggcccagggattggcactattacgtgtggccctgttagagtaagtgtgaccttgtgagagtaggcatgtcactgtgggtgtgagctttaagaccctcatcctagctgcctggaagtcagtattctgctagcagctttcagatgaagatgtagaactctcagttcctcctgcgccatgcctgcctggatgatgccatgttccctccttgatgataatggactgaacctctgaacctgtaagccagccccaatgaaatgctgtcctttgtaagagttgccatggttggtcatggtatctgttcacagcagtaaaactctaatatagtgtgtaacacacacacacacacacacacgaaaagggagttcagtgtctgatctgaggaagtgctctgaacaacgcaggaccagagtctgaaggtagatgagaattgatgctaatcctagaggtttcttccaagagaaagcacatacacccaaggactgaccctgtctgaaacagacagcaagaagggcagagaggtggaggaactgcagatgcagagaccctggggctgaaacagacttaccagggtccaaagaggggaaaaaacacagtagtgatgtccacaagtgtaagtcttaacagaaggtcagaaatgccattcaggatgttggggagagtggccatggagtctgggaaatctgcccccaaggagtggtgggatgtttgtgtctgaacaggctgcagggtgtgagtaggagcttcctgggtgactggagtgggtgtgacccagatgagcctagcttagtgaggagagtcacccacatggctcccttcctgttatagtagcagtttctgttaagaaaaaagttcttgggatttcctgttcttttctccacctcctctggttccccaactcttgtggggcctctcgggcttgggaaagagcagagggagagaggtctggcagtgcagggtggggctttccgtgcagtcttgccagctgcccctctttctccttttacattgcacttttaccttgttgcttaagttttatgcatatggattaatttgtgtgtgatgggcaagtgatccagtgaatgtacgtcagaggacacagcctctgggattcagttctctcctcctaccacgtgagttctcaggcttaaactcaagtcatcaggcttggtgcctggtgcctttacccagggagtcatttcaatcgctctgctgcctttataaaacaacaacaacaacaacaagaacaacaaaacagtcattgatgctctggggagttgggagtttgagctcttggggtgtagcttgggagtcaggaagggtttgcagtgacagtgccttgacatgggactgtggctcagatggcaggctgaggttgcatgctggtacccagtaataccctatcctccctcccatagatctcactgtgtagctgtgtgttgtcccactcagaagaggagggtacctctctcactgtagccttcagcctccatggctggggtcaggctggcttctccagagaggtccaagtatcactgcagcctaggtctgtggacctgaggaggactgtgggatgggaactcattatctctcactccctgtatcagtgagtaaagtgatcaccggatgccataggatgctaattgctgtgaataggatccctgtgtggtggcatcagctccagagtccttggtactgcccagtgctgtccacagaaatacgatgacagctacgttcatatataatatgatattttcttacaaccacatgggaagaggaaagagaaatggggtgaacaatgtccacagcctgttggttctaacccattgtattccaaatgggcccaaatcctatatattttaccctaaggacttacttgaatttagactagtatttttcagtcttctaatgctgcgaccctttaatacagttcctcatgtcatggtgacccgcaaccatgaaattatttttttttgctactttataactataaattttgttaccattacaaatcttaatgtaaatatatgtgttttccaatagtgttaggcaacccctatgaagggtcctgcaatccctaaggagctgggacccactcattgagaagctctggtttagacctactatgctttcttgactagtttagaaattgaaaggggtgtccctggagggctagggaatgtgccagtcttcgccctctagtgtccgtccatccttagtgcagcttgggtggctccaggtgcatctcctgcagctaatggccattctgcagagggctgcactgaagtggaggctaaggctgtttgagtttcacctacagcaagaaggaggaggagcgggggaggagggggggggggaaggtagaggaggagggggaggannnnnnnnnnnnnnnnnnnnnnnnnnnnnnnnnnnnnnnnnnnnnnnnnnnnnnnnnnnnnnnnnnnnnnnnnnnnnnnnnaataatattctgctggtcactgtaaggaagagcacagttgaggctgatttccccctgccaccttctgttccacctgacatggaacaggctctccatcagccaagtccagatggcctgttgaagttcaacttcacagaggatgcacccagtctctcctgagtccaggacttcatagggatttggtacccacgtctcccaccaccttctttctatgtctagcagtccttgaggtttggcagtctgactgatgagattgctgcgtggtgggatgaactgtaccatgcgtgttcctagccagcactgagctttggttaatgggacattggagctcccaagggcctttcccagcgacagcacaactgtgctgttagcaaagctttttactcacagtaccaagctcgggttaaatatttccacagagcttcccagctacttgtttggtctttccttaatttacaattcagtgtgttaaggacaataagaccctgggaggaggcttaggagctgttagctccctcccccaattcccattactgagaagtcacatgtcctccatgctcggaggctgttgtctgtcagatcttatccctgctaaaatatgaagtgggaggtggctgtgtgatccccagggaccctcattcctcgccccctaagaagatgaaagtagggctgtctgatcaatgaagcctgggttagtctgatgctaggtaggtatttcttcaggggagcaggcacagtgatttttctgtccctgcataagcattctttttttgccaggtgttttcccagacagctaaacatcactaaggctggctcggttgcttaatgaatgacagaggggtaaaggggtatgtaccactgagcctgtcacacatctttgctactgtctcagtgcttccaggagagctaaaatgaggtcccttgtattaaatattttatccaggtctctgttaggcatctacaggcaagtgccaggaagcatctatgaggccgccagcatttgtgggctccacttagcaggttcatgaaagtgagcattaagagatcatggctttgacagccactttattggccagcagcttctttgggtaccagctaaacgcaccttggaacctccttgcctctcaggatgttagcagggaaggggcccaggatagatcaaaacccaaaggacagagcccagctctaacctaggtcttttctttctgaatgggactcattctgctaactcctagctgagccacgtgagaccgcttaccagtccctggaggctctgtcatcttctaccatcccctctgggccttcagttttgactctaaatgccatcttcctagccagaccacctaattctcctgcctaggaatgtgccattgtagtgcagggcactcgagagtagggacctcaatccagcatgactcaagcatctatacttcaagaaccgaaaagatgcaaaacactggagcaggtccagactgcttactcaagtgtgggcttctctgtgagccaccctctcaagtgatggggtgtatctgtcagcctaagctttcatgtgacaagaaggaggctaaggtgagggtggggggctttctgctgctgggagcctgctttcttgtcctccctgggagttctttggttagcttgctctatgactgttggtcctctctcccaagtctctttactgaatcttcgtcccctttggaaatggaaagggggggggtcactgtcactgactgcactgggctgagagttcctattggtcagggatagctgctggatattcaagagtctcagcagcacttagcattgtaaaggtgtgttttcccatctgggtgtagtggaacgtggcagggcaggaggattctgctccatggagtccctccaggaatggggcttctttacacagagcctttctttactggagtttcaggaaaaaggccaatcctaccctctcttcctccttatctcatactgcttatgccattggtcccaggtgcttaagatggccagacacattcctattgtcacaaccctttctttgaatgacattgcatgcaggaacagatcttcaagccattgctcctcagaaccagatcctgaggctcagacccttccttttcccttttctacatcccatgaaccctcaatgcctcatgggtagccctgaaacatggattgaaggctccccggtggtctccatcctcctgatgccttgttctttgcattcaaagatggtcactcgggatcatcttggaggctagatatgtcaaagttcttcctgcctccaaattagtattagtacatcctgggaacaagggcatctctgtgtgtgtgtgtgtgtgtgtgtgtgtgtgtgtgtgtgtgtttactataaccacaacagcaaaaatatccaaaaccaatgcaaagcatgaattctaattagcagcctgataccagggaggaggtaaaggctgggcagaggcacagccctgtgttctggagctcccacctccgaaatatttggtaaggagcagatcttcaagccattgggaagggaatgggaaataagggaaacgaagcctctcctctaacacctccaaggctgtctgcactgcagcctcctcctggcagatatctgcagagcaggtacaaggagtttggtattctagtagcatctgttagatgataaatcacagacacagcagtgatgtgtgttcagtgaggtgagtggatgctgcgtgcgtgagctggaaaccaagggtctgtggcaaggctgtggggtgcggggctgttgatcatgaagaggacacagggctaactatgggggcaatgcagctgtttccacactgcactctctgggactgtcatactagcacaatcccatagctgggtatcctggagtcaggtcctggctcacttaggagaggttctgcagttctctgatggtcagttctctggttagcaagatgtatctgatgagtgaactccaggccagagacacgttgtaagtctccctgtgttaatggttctttagtgaggaccttgtagcacaatcccatagccgggcaaactggagttgggtcctggctatcttagtagaggttctgcagctctctgatggtcagttctctggttatgaagatgtatctgatgggtgacatttctaagtggactccaggccagagacatgttgtaagtttccctgtgtgaatggttcagtggtgagggccttggagctacatggcttcaccaggtctaggtcttttctctccaatactagtatttgagcagaggatcccacacccccactccacagctcggtcctacctggcttctctacctttcacctcctaccaccccaaactctgctctgttttctggggtcccccatccaccttgtctcacacagatgcatctcctgcctgaaggcctcctgagggcctgccactgacagagacatccaagcagccactttcctgggctcagctcattgtcccatcttctaggtactccagttcccctttctccctcccctgnnnnnnnnnnnnnnnnnnnnnnnnnnnnnnnnnnnnnnnnnnnnnnnnnnnnnnnnnnnnnnnnnnnnnnnnnnnnnnnnnnnnnntcccccatcaaatattcctggactatccccaaatatctccttttgcaaccttctgtcctggtccactaagggattctttggaccaaacatcaccaggtgtaccaccctcccactgttggctgtcctattcttacctccacttccgtgttcccagtgtggcttcaattttacgagtgtcttgttaattgattttccaaaatgaattacctacaataaaactagggcatttctatcccttcccaaagaatcatgatatggtcttactctgtgttggggtgtggattagagccctgggtagtgggctccatggagagcaagtaactgttcatctgtatgcttatcctaggcctgtggtgaccccctcagccaccagcagtctcatttgtcctcttagggcagactctctgtggctggagaagttggtattgtgggcttctgttcagagctggatatagctagcttcttgtggtacttttggccagtactggccactctgtcaagctcaatctccagtgaggcagggagaggttgcctgacttgtggctgaagcccaggctgtaggtgataaggaaagaggacactaaaccttggtagaagcaaggctgtgaaataggaagtgaatgtagcaagaaaacagaggatctggcagtcagccatcaccgggggatttgagagggcctgcgcccctctatatatgcactccaggaccatagttctgccttttcagatttgtttcttgtttttgagacagggttctctttctgtagaccaggctgccctgagctcaaagttatctggctgcctctgccttctgagtgctgggattaaagctgtgtgccagtggcaaggttttgtctctatttcttgttcctgaagcccctcccagacagggcttagcctatagtgttctatcaactcggaggttcttagacatgccaccagtcaagagatagaggctgggacactatgatttggggatgcttcttctttgagtagaaaataaaagctaaggagaatgggatcctggagagagggctcttgctgttcttgcagagaaccccagttcagtcctgttccctacacccacatggtggctcacaacttctgtaactccagttccagggatcctacatcctgttcacaactctgcaggtaccaggcacacacacaatgtattatataacaagaaaactcttgtagcataccatataagtaaatattattaaaacattgaaggagaaaaaaggaaaggaacacgtggacacatttcaacatcttaaaactgcaaatgagccaagcccggtggctcacagctgtgactgctagacaggggaggcaggaaagtaagggtacaggtcgtcctcagctacatagtaagtttgaagccagcctgagctacatgagaccctgtctcagaaaacaaataaacaaataaaattacaaaggaaaacacaacaaaagggcctacaaggtccctgtccatccagccaattccccacttcagtcaactttaccattttctgtaagttcttccagaggaggcctccacagacaaagccatctgaccttttctcaaagatggcagctgtcatcacgacccttgtgcatgatctttttccattagtagatctctctctctctctcccccgccctgtgtgtgtgtgtgtgtgtgtgtgtgtgagagagagagagagagagagagagagagagagagagagagagagatgggggggttttctgtgtagtcctggctatcctagaacttgctccgtagcccaggctagccttccttgaattcctatctgtctgcttctgtcaatgagtactagagttaaaggcatgcaccactacttccctgcttgttctctttcttttaatataattttttgagacaggatctagtgtagcccaggctagccctgaattgctatatagtcaaggatgaccttgaactcctgatcctgctgcctccaccctccagttctggaattacagatgtgtggcacccggctacctgagttgatgattatttctgatcaagatactgtggacatttgagttgattgtttgtaaaggggagggcgtgtttagataagtaaatgtgtgctttgaaaggcaatattaagctgccgtagttctatgttgaacaaggaactttaaatatctcctagtcgtgtagataagtaaataaaatatgtacatagaaagctaacagcctgggaaagatgtgaaaaagacaggggaggtagcaggtaatactgagtgcatgtctcatcttccttaacaggacctagcacctagtgcttagaattcataagcctctgagcagttcagagtgatttcctttgggacttgggtagaggagattcacccacactagttcttcttcacatttcaaaaataactgagctatgcagtgtgttattgtgaacgaaagaaaccaaaattgaggtaggaaagtgaacgagtattaatgtccagtggccaatcactgcaggatctcacatttggggcttgtgggagactgcagtgggtgtgctggccaatggagcagagtcctagatttccattggggctgtttcagctgttaacattcatatcaacattcacagaccgattgatgccaattctagatctccctggcagaacaatatctcataggaataataaagagtggggactcccataaggttcccaggtgtctcttctagggttaaaaacagcatggtgtgtgctggtaacttctcccaatccattatgtggagggggacagggaggtcttgggggtaggaatggggttggtaaatgtcatttataaaattagggttgcttataaatgaagttgaactttcaaaggctaaagccatgttcctgttctccggtatcatccctgagtccactcaggatgggagtcaacctagttctaaatttaccctagctgtgttagctaagaatgtgaaccactagcatctgcctatgcaggcgtgatttatttactacgcagcatcagcaaatgttatctgtgacaaggaaacaaacacacacaccgagtcccccacgagaaaaagaactagctgttcaaagcgaagagtcaggattgggtccataagacccctttgccccaagctgatgagctgaggggtttgtcttgatcctgcctcttgtttaacccttacaggacatttgataaaatttcattccactgattttaggttgtctctccctgtccccttataccacgattttgcatgcatgctccaagtagactgtatttagccattaaaagatattctttctgtctttcctagagtgttctggcgtttgccatgttgtatagaaccattttgtacctcctgaagagagccattcaggaaacgctaaaagtcggagcttgcactgtcatggtcttgagttcttctggcccaaaagttctcaacctgtgtgtcacaacccctgtggggattgaatgaccctttcacagtgggtcacctaagaccatcctgcatattagatatttacgttatgacccataaccatagcaaagttacagttatgaagtaccaacgaaaataactttatggctgggggttcaccacaacatgaggatctgtgttaaagggttgcagtttttgtaaggctgagcaccactgctgtaactgatggcactggacatacaaaggatgttgcttagccagcatcgtggtagggtgtgataggaagccagaccttgggtcccaggcatccacagcttaccttgtgtcttgtccttgcaggtttagtctccactgccagctgccatgggcaagcagaacagcaagctgcgtcctgaggtgctgcaggacctgcgggaacacacggaattcaccgaccatgagcttcaggagtggtacaagggcttcctcaaggactgccccactggccacctgactgtggacgagttcaagaagatctacgccaacttcttcccctacggcgatgcctccaagttcgctgaacacgtcttccgcaccttcgacaccaacagcgacggcaccatcgacttccgggagttcatcattgctctgagtgtgacctctcggggcaagctggaacagaagctcaagtgggcctttagcatgtacgacctggacggcaatggctacatcagccgcagtgaaatgctggagatagtgcaggtaccggcacttggcagggccaggagtgtggggtacacagagagcgcagggatccaggacccccatcccggaccccataaaccaggtcattccttggcccacttgctggtgtacaggagtggaggtctttgcagagagtaacaataaaagccaagcatctattgattgcttgctggacatcaggccccagctgagctcatctgtaaggtttattcacacaattctatgaaacaggtcttgtggccttgtggtcttgtggcagcctagctaaaatggtaagccccagccgggttcagtgagagagagaaaagggaagattgtgaacaccggtattgctgtttggcctctgcaagggtaggtgttcatctgcacacatgtgtataacatacacacattagccgtctatagggcttcctatagaacgacacagtaaaggatgagtcagcagtcagttcttcacaggagcgatgcttatgtgcaccctgcatccttcctgctccatgctctaaaccatctctgtatttggtccagtgagctgactctgtgggtaaaggtgaatgctaccaagcctggcagcgtgggttcgatccctaagacccacatggtaggaaaagagaaccagggtccacaagttgtcctctgcagattcaggacccatggggtgggcagggctcactgtatttcccctttgaccttccctctgggcttccccagctccccaccaaagatcctttttcagacagagctatgctctccccaccacccccactctcccagctcaggaaccctccattcttctacgccccagctgtattctgttctcttgaacgtcacttaacctttcctggctccctttgcccagcaccttgtctgtgagacttgttctgatgagagaagggtcctgactctgccctgtccatgctccttggttagctgagcgaggaccataactcaccctccatcctccagagcacactcacagatgcccctttgcaggccatctacaagatggtgtcctccgtgatgaagatgcctgaggacgagtccacgcccgagaagcgaacagacaagatcttcaggcagatggacacaaacaatgatggtaggaaacatgtcaggagtgagcaggtggggtgggaggaggggttaggagaggggatgggggtggggagaagggagcagatgtacctgtgaaactgttgatggcacacaacaccctgtgccctatgcagcactgcccctttccagcccacttgattcagctctcctgaagggagggagactagaattcagggttaggggcacctagcctgcaatctgaacccttccaatggctttataaccatgggcatgtcagtagaccctctgagctgtagtcttcatccgtgttgtctgtctgagttagggtttccattgctctgatgacacaccatgaccacaagcaacttggggaggaaagggtttattcactcacagtttccatataactgttcatcatcaaaagcagtgagggtaggactcaaacagggcaggaacctgaaggcaggagctgatacagagaccatgaaagggttgctgcttactggcttgctccccatggcttgctcagcctgctttcttatagaactcaggatcactagcccagggttgtaccacctacaatgggctgggccctcctccatcaatcactagttaagaaaatgccttctggtcagacatggtggcacttgtctttaatcccagctcataggagacaggaggctttctgtgagttcaaggctaacctggtctaaaaagtgagttctaggacagtcagggctgttacatagaggaaccctgattaaaaaaacataacaaaacaaaaaaggggggatggagagagagagagagagagagagagagagagaatgaatgaatgaatatgccctataggttttcctgcagacattttatagagacattttctcaagtgaggcttcctcctccctgataactaaagcttctgtcaagctgacataacattagcacatgttgacagaaggagtggtcttactatttctacaagtatatatgggaaggggaagcaggtgtactggtggctgagaggtgagacactgtgaatcaaggggctttgagtcttgggattctgagaggccgcccaggccatcatcctgggatgtgaggcacctcggatgctcatggggttcatcaagcatagaagcctcatctgcctgtggtcatcgtatctaggactgtgaggtcctaccacagctgcaaaacagcaggtctcaggcggaggcaaggtggtgagaggtcaccaggacatgccctgtgtcctcctgtgccttggctgagtttctcacaggacctcagcaagggtgaggtagctgcacggtgagttgatcctgcccgtccgtgactttgtagagccaagagtgattggcttttgttccaacacgaaatgcagcatttaggcaagaaaaggctccccgggttgcgctgaaattaaatgtacgcaaatgcacaggaaagtgctgtgtggaacctcgagtgcttggtgcaggtgagctgaggacagggctcagcgggactcaaggctcccgtggaactgtagacagcaaaaagctttccagacatcaaggaaatgcttttcaaaacatgtccacacacaaagtaatgcagcctcttgcctggtgctgcctttcagccattttctaaagtgttctttactctcttgtgtaccgtgacatggaggcttgggttccgacagatcatactgaggcttgcccacttcccaggcttgtctttcttctccgtgaaatggagataagcccacttgtgtgggtgtgagtctaaagtagcactatgttggtggcacacttaacatggagggccattgtttctgattgtcaaagccaggaacttcaacagtttcagagtggagactgtgtccccactgtgcacttgtccaattgtttgtttctcataatggaggccattgagcgcatactctgccctgtaagccaggggccacctgctagcactcaagagaggagaagtctgggcggtcagagaaactggtacagaaaaccacaagaataggacagcaaaggtggatagctctcaacacccgaagctcacatgattctacactagggggcgctgtgatagttttaactgtcaacttgactcagtttagaatcacctcagaagtcattaagatttagtatttattttctacatgagggtttgcctgaatgcatgtttgtgtaagacgttagaggccaggaaagggcactgggtcgccctggaactggaattacaaatgattgggaaccaccctatggatgctgggaactttatccaggaccctctgcaaaagcagcaactgctcttaactgctgagccatctcaccagccataaaggagagtctttttttttttttttgcttgtttgtttgttttttagagacaaggtttccctgtgtagccctggctgtcctggaacttgctgtttagaccatgttggcttcaaagtcagagatccaccagtctgcctcctgagtactgggattaaagatgtgtgccaccactgctcagctcagaagaatcttaatgaagaattatctaaatcagtggttctcaacctatgggttccaacccctttgggggatcaaatgaacttttcccagaggtggcataagaccaacagaaaacacaaatattcatattcagattcataacattagtgtaatcacagttatgaagtagcagtgaaaataatcttatagttgagggtcactacaacactaggaactgtattaaagggtcacagcattaggaaggctgagaaccactcatctagatcatggcagcctatgagcatgcctgttgggggttgtgttgatggttaattgatgtgggaaaccccattactattctctagacaggggacctgaacagtgtaataaagggaaaagaagagtatcagaaaaaagtgcagagtctcattatgagccatgtgctcatacctctattctctctgccctgtgaggttttaaagccttgacttcctgaagtgatgaattgtaacctagaagtaaaccaaagaaaacttcctcccttaagttgcttttagtcaggggatttttatcacagtaacagaaatgtaatttgacctgcagccataatttgtcctgtctccccagctgccccagatcgtggtggctctccaggtctctaagtgtggctagcagcttacttcatgccatagagttcattaccaaatctcatgacttttgctccatccccacgacctacaccttgaaaggaaaacctgctcttacaagttgtcctctgaccacatgtgtgcctcaacatggcatgtgtgtatgtgacaggaggagagtgagtgagtgagagagagagagagagagagagagagagagagagagaaaagactggacattgtccatttttcagagggctccagactttaagcagagcactgactaatcctacatctcctgcttccatccctcaggcaaactgtccctggaagaattcatcaaaggtgccaagagcgacccatccattgtccggttgctgcagtgtgatcccagcagtgctagccagttctgaggggaatgggcttttggacatttgtgagaaacacaggcttggcctgccatcttcagctttgcttgtaaaagtggatttctccgtgatctctcctgctctcccaggacctgggtccaggcagcaatcgcaccctcctgacctggccaactgtggcttcctcctcctccagtccaggctggctccttccaatggttcaagtgttctcggctgtcgggctccttcctgcccacagagggcctggcggcccttaaggacaccagacaggacttttcagtatcttaccaagaccagctaatttattctatgatcccaggtgactttgtgaggatgaaaaagatggagagtagacaggcaagcccttcctgtgcatggctccacctcccttgttcattttctctgaccaaagccgcttgcatgtatataccgtggtatccttacttttaatatatgagttatttgtatggtgagatggactataatgttcagcccctgtatttaatgcctctgactgcctttgaagcatggtcccctgtggcctgtgattccccccacccccaagtctggctgtgctgtggtatttatgcattcatgatttgcctgattccacaggagatacatgcatgcccagggctgtggacatctgccctccgtcctgtaaatgcaggtgtttctgtgtgctctgtccttcctgtcgattggtatggcatattaaaatgatcaaataaacccaggtctgtgagtttcctgtgttgcagcattcaccctgttcatggttctgcccctttccgatcctgagcagaagtgggtccctcttctaactgccactatgtctacacacatactatgcctgttctacaatatctgcctaatgccaagaaagccttgtgaaaatataggatgactattcttggcaggtctgactgtgacacgctgcctccctccccactccctctgtggttttatcagcaaggtagcaggaaagccaacttcaagagaaaggagcagggtcagcagcagcagcagtgagggggaagacctgggctctcattatcctcttctgtgatcatgcctatgtctggtccctaaaagtgcttccatcatgaagatgtttgcctcttgtacccagaagtcatcaggaaccaatatgtttctcccgattcccatgtcccccatgtcttagttaaggttcctggtgctgtgatgagacaccaggaacaatagcaatttggggaagaagtgtcttatttcactcgcagttgatagaacagttcagcaacagtgagggcaggaactcaagcaagatcaggatgttctcttaattgctgagccatctcaccatcctgacttgctttcttacacagtgtcttagtcagggtttctattcctgcacaaacatcatgaccaagaagcaagttggggaggaaagggtttattcggcttacacttccatactgctgttcatcaccaaggaagtcaggactggaactcaagcaggtcagaaagcaggagccgatgcagaggccatggagggatgttctttactggcttgcctcccctggcttgctcagcctgctctcttatagaacccaagactaccagcccagagatggtcccacccacaaggggcctttcccccttgatcactaattgagaaaatgccttacagttagatctcatgaaagcatttcctcaactgaagctcctttctctgtgataaccccagctgtgtcaagttgacacaaaactagccagtacaattgaccccttgtcaacttgacacacaaacacatcactagtaagcctcaacccttacattcttattcatccccaagatctaaataactttaaaagtcccacagtctttacatattcttaaaatctcaatctctttaaaatatccatctttttaaaaatcctaagtctttttacaattaaaagtctcttaactgtgggctccactaaaacagtttcttccttcaagagggaaaatatcagggcacagtcacaatcaaaagcaaaagtcaatctccaaccgtccaatgtctgggatccaactcacgatcttctgggctcctccaagggcttgggtcacttctccagccatgccctttgtagcacacgcgtcatcctctaggctccagatgcctgtactccactgctgctgctgctcttggtggtcatctcatggtactggcatctccaaaacactgcatgaccccttcagtcctgggccatcaattgcaactgaggctgcaccttcaccaatggccttccatggcctctcacagtgccaagcctcagctgctctgctcaactccttcatgccttcaaaaccagtaccacctgggtgacccttacacaataccaagtccagccacagcacaaggtacaactttggctatatctggaacgcagccactgtgctctcagaaaacacttccagaagatgtcacctcaatgatgctggtctcttcttaatcaccgctaatttcttagctccagctaaccagcatcaatagtcccagtaatgcaaagtttttgctttagtagttctggtatcttgttaatcacagctgattcttcagccccagctaaccagaactacagaatcttcacaatcaaaacaggaatggccctgaaaagagtctttaattttccctctgaaatttcacacaccagagctccatcttctgcagtgttctcaacattatcttccaagctcctacacaacatccgacagagctcttaacaacggatggatcttcaagcccaaagttccaaagtccttccacagtcctccccaaaacatggtcaggttgtcacaggaataccccactcctggtaccaatttgtcttagtcagggtttctattcctgcacaaacatcatgaccaagaagcaagttggggaggaaagggtttattcggcttacacttccatactgctgttcatcaccaaggaagtcaggactggaactcaagcaggtcagaaagcaggagccgatgcagaggccatggagggatgttctttactggcttgcctcccctggcttgctcagcctgctctcttatagaacccaagactaccagcccagagatggtcccacccacaaggggcctttcccccttgatcactaattgagaaaatgccttacagttagatctcatgaaagcatttcctcaactgaagctcctttctctgtgataaccccagctgtgtcaagttgacacaaaactagccagtacacacagccaagaggtggcaccacccacatcaatcattaattcaaggagaatgccctcacagacttgcctacatgcccagtctgatggagacatttttctctggagtttgtatgcttggttttggattttattttttattttttgagacaggctttcatacaggtttggatggtttaaaggtcaatatgtagatgagctggcctcagactcaaggagatccacctgccgaggcttttctcaactggggttcccagatgactccaatgagtctgcaccttttccaatggcctcctggccttgcttcagggactctgaccctgctatatggtgccaaacctcagtttctccttatgacacccctgactctgcagctttcatgctgccaaaaccactacactatgggaaacacataaccaagttcagctgccagcctgagatgcagccttgcccctgtctggagtccagctgctgcatgcttgaccctggagaagggcttcccagaggaagtcacctcgctcaatgatgctgctctctcctaagtcacaactgatttctctaccccaaatgaccaatattgtctcacaaagcaaatgtttgcttcagtggtgctagtctcttgttaatcatagctggttcttcagtctcagctgatcagaaccacaggctctgaatatacagtgtcacacagatggccctctgcttccctctgagaagaacacatgcctacacatacatacacatacatacatattactgcacatactcaatgcacacagctaattgatcaatttttaaaaagaaaatgttgaccaggcagcatacacttttggttccagcactgaggagacaaaggcagatggatctctgtgagtttgaggccaacctggtctacagagtgagttccaggacagccagggctacattggaacatagaaaacctgtttcaaaaaagaagggagtggaaggtggtctgcactgcgctgtgctgggctagactggtaggcagtcataggccacacagacaacgctgaggcagaggcatgaagaaacctgaacctctccaatgagcgtggggatgaagcaggggaaggggtagatatggagaaagatcttgaatgtatggaacagctgagaatttactcagagaggagtccatgccagcctttccccactcagtgggctccacacacagcaaggccattggccctcctgcttaaagtcacagaacctataggttgagcttcagagagagcagtctgaagatgttcaggaagcacccactgagcacctgtcctggtgagcactggagactctgagattggccagacattgtctttgctcccacctcacctcaaggagaaaggtgctgttggctagaaggtgttttagattttggacagaaacggtccctcagggccaaacagggcatgtgccttggctaatgtcacccagcaagttcaggttcacatattcaaataatggagagtaagagaatggatggatgtgtctgcacagtctctctctctctctctctctctctttcaagattgatttattttttatatgtaagtacactgtagctgtcttcagacaccccagaagagtgcatcacatctcattacagttggttgtgagccaccatgaggttggctgggacttgaactcaagaccttcagaagaacaacagtcagtgctcttaaccactgagccatctctccagcccagggagtcttcttaaatggggaacccaaagatacccaggatttgagagtacagtgagtggtggaaataggagcacggaaatgtggcggctgagtcagggaagtcatgagttctaggaccacctgggctctgtagcaagaccccatctcaaaaatccaaaggagagaccaagtctgatctcccagatccacatggtgaaagggaagaactgactcccataagttgtcctctggcctccacctgcatttccaatcccagcactaaggggacctgacaatcgatcgcatcaggagtccaaggccattcctagctacatactgagtttgagaccagccagggattcatagtgagacgctgtctcaaaaacaaaacctgacaattgtcatagaaagtactaattaggacttggccgttaagagcactggtggctgttccagaggtcctgagttcaattcccagcaactgcatggtggctcacaaccatccgtaatgagatcagatgccctcctctggtgtgtctgaaaacagctacagtgtacttacatataataaataaatcttaaaaaataacaaaaggaagaggggggagaaagatgagggaggaggatgagggaggaaagggaaggagaagaagaagaggagagaggaggacgaggagggaggaggaggaaaaagaggaggaggaggaggaggaggaagagggaaaagaggaagaggtggtggttctcccatgccagggccatgctggctcctctctccatgtgaattgctgagttctgtctccccactgtgctctgtcactgcctagttcaaggggacagggggaagaagatgaacagtgcttggggtttcaaatggcccacagtatctgagcctgggggaggctgctgtgactgcctctgcttcctgagtgctggggccaaaggttgtgcttactacagcacaatttccagcctctagagacagcttttgaggcagtcttgatgtatagccaaggctggccttgaactcacactcctcctattttcaccctctgagttctgggatcacacgtatgaacctgctggcgctagggttttttctttctttaatattgtatgtggggatggagtacacatgtcaggagtgcactagtgtaaacacacttgtgaaaaacagacctcaacttgagtgtcagtcttcaggttccatctgctttgttttagaagccactgcagtgcccagaacttgccaagtaggctaggctggctggctagaaaaccccaaggaatcctgtctctgcttcctcagtactgggattccaagtgtgtgccaccaaacctgcctagggatgagattacacattatggactgggcatctcccataaatcactaatttagaaattaccctaccgttgccctacagtccaatcttttaggggtatgtttttaattgaggctctgtcctctgatgactctagcatgtgacaagttgacataaaactagccagtacactttaatacatatattcatacagtactttaggactatactaatttttctgcacccacatacatgtgtttatactgccatgcatgtacacatgtatacacgcacttataggaatataggtatgcatgtgtgtacgtccatcttgctactagatatgacatgtgtgtgtacaaacttgtgcacatatatttggtgctatatctgtttgggagtacacatctaagcagaatgggtctaaatggatccatcccacacctgctacttcctagtccctattttgcctcacactgtcctctgagctttctaacctggtgcaggtactggctccacagcgccacctgttgaccaacttgtttctagagatagatacatagttgatagattgatacttagatgatagttacatagatacataggttatagataaatagatagatagatagatagatagatagatagatagatagatagatagatacatacatacatacatacatacatacatacatacatagatgatgggtagttacatagatacatagatgccactatgcatcagagaggaccatcagaggagaagtccagcggatagggacactaccaacacagcccctaagatcacagtgtccccagatagtcccacagtctattttcaaatctaaagatgaacttcctgtcaggaagccagggccattcaagcaggggaggaagcaccacccaaaagggacaaagtcttggtgagccttgaatgtggcttttgcacttctctgccttgtaggagaaactaatcccaatccacaccttgccctataccaaaccttgtagctagacagtgttggagacagtggtagcaggaagcccagagtgggaatgtcaaggctgggggtgggggtgagaggatggaagacagttggaagcaagatggactcctgagccgtcctggaggttctagccaaacttacctgttctacttcactcagtggatttttaagatttattttattatttcaactgtgggcatgtgtgtaccctaaatctaagaaccctaatactgaccataaccctctaaaatagcctaaccctgcttactgtgggggatatgtcttaattataccttttgaagtgagaaaccatttcttaatcttgatcttttgagatggtcagatccaccttcaatctaggcaatagattcttttggcatcccacatacataaaagacaatgaacagggttgttctttcatttttttatacttgccctatttttgtattttagaaagggtgatttgcttgtttgatttttaaaattggccttggaaagtacttatttcttcagaattctggtactgtgagaccccgacttagagtgtttctacctggaagccagagatgcaataattgtaggaagacctacaaggacatggagatagacgccggaaaggaggctgcagctcactcccccccaccccccgccagaaaggagctgtagccaactctcctcccaaattctcccaactcttcccaactctcctcccaaattctcccaactttcccaactctcctcccaactcctcccaattccttagctagctgttaaaagcccccactgtcacctgccctgcatggcagagggacttcatcctcagctgataataaaccctcttgcagtttgcatcagttgtggttttctcttgagacattgaggtgttggccagctcatcccgggacttaagtggaggcccagcttcaggggttttacatgtgggggcttgtctgcggggatttgtggcctaccccagttctcagagaccctgcttggaggtaggatcctatctttgtctatatctttgtctatgtctttgtctatgtctttgtctgatggctgtgtttgaattcggtattctctgtttgcccttgtccttactcgtgagagcaacgaactccttgtctgggatggaggggagggttactgatagacgtgtcaggagtaaccggctgccaccctgggagaagtcccaggaggtctgagggagctccagggacgcctggagatttcccatcggggtgccaagtgagagtgtgcttactcggccatctgttcctgttactgggtgccaagtgagagtgtgctcactcggccatctgattgggtcctggtctcagctattgtaatcttttttgtgtgtatatattgtttgtttccctgtatatgactctgacgatgggacagactattagcactccccttggagtgactcttgagcattggactgaaattaagactagagctcacaatctgtctgtggatgtcacaaagagattttggagaactttctgctctatggaatggtcagcttttgatgttggttggccaccagatgacactcttgatctgattgtgatttctgctgtaattgttttgcaggggagaccagggtctcaaccagatcaagcaccctacattcccatctgggaaaatttagcgcaggacccccccatcctggttgaagccttgggttcagaggaacaagccgggctcccgagtcttggctctccgccactcagagaaaaaaactaagataaaacgggagggctgaaccacagcccttggctcctcccaggatctatccagagatagaaaaacctccagaatggcgtaacaccccacccccatatccccaacaagtcccctcccagatctctcaacagggtgccactggagatgcaggggagggaccagctgctagaacccgaggccatcgagctcgaagcccagagggaccagactcaaccaccgcactgcctttacgtacttatggccctcctccagcagaccccggacaactgcagccccttcagtactggcctttttcctcctctgatctctataattggaaggcaaatcacgcccccttctctgaaaacccctctagccttactaatctaatggaatctctcatgttctctcatcagcccacttgggatgactgtcaacagcttttacaggttcttttcaccacagaggagaaagaaaggattctgctggaggcaagaaagaatgtgctgggggccaatggactaccgacacaatttccgaatgaaattgatgcaggcctccctctgacatgtcctgactgggaccctaacaggcctgaaggtagggagcagttttccgctgggctctggtagcaggactgaggagctggcaggcgctccaccaatttggccaaggtaagagagatcctacaagaggaaaaggagcccccagcagtgtttttggagcgtctcttagaagcatacaggcattaaactccctttgaccctacgtcagaggaccagcaggcggcggtggccatggctttcatcaggcagtctgcttctgacattaggagaaggttacaacatctagagagtctgcaaacattatctttgcaagatctggttaaggaggcagagaaagtgtaccataaaagagagactgaaaaagaaaagggagaaagagaaagtagaagagataaaaggcaggaaataaatttaattaagattttggatacatttgcaggtgataaggaagtttatagaaaaggtagaggaagtaggcagagaggaagtaggcagacagggtacctgggcaacacagggccgaaaagacctcagaactccagaggaccttcacaaccatctctagataaggaccaatgtgcatactgtaaagaaaagggacactggacaggagactgccccccaaaagagacatataccagactgcccaaggtccttaccatagaggatgatgactaggggagacggggctcagaccctctccccgagcctagggtaaccctaactgtggaggggacccccacggatttccttgttgataccggagcagttttcagtcctgaaagagccactggggaaattgaagaacaagaaaaccgtagtaatcggggctactggtcagaaaccatactcttggaccactgataagaaagttgatttgggaagaagccaagtaactcattccttcctcgtcattcctgaatgccccatcccattgttagggagaaacttactatcaaaattaaaagcccaaataagcttctctttggaaggaacttcagtctcttggcaaacctctatctctataattttagctttaaaattaaaagaagaatatagattacatgagcctcaagcctcatcgagaaaagtactagaagggacctggttagagagatatcctcaagcctgggcagagactgga

SEQ ID NO: 3129 - DNA, 1556 bp, Mus musculus
cgggctggcggcggctgcgggtggtggacctgcagagcggccgtcgcccacacctcgctctctcctgggccggcggatccttttgtctctccgagcggcgaaggtcgcagagcaggcgcggcggctgcgggagcgcaaacgcccgctctctcggtcacctccccagcctcggccaccgcagaacttgggctcgagaagccagcggaccgcgtccagctccagagccggtttagtctccactgccagctgccatgggcaagcagaacagcaagctgcgtcctgaggtgctgcaggacctgcgggaacacacggaattcaccgaccatgagcttcaggagtggtacaagggcttcctcaaggactgccccactggccacctgactgtggacgagttcaagaagatctacgccaacttcttcccctacggcgatgcctccaagttcgctgaacacgtcttccgcaccttcgacaccaacagcgacggcaccatcgacttccgggagttcatcattgctctgagtgtgacctctcggggcaagctggaacagaagctcaagtgggcctttagcatgtacgacctggacggcaatggctacatcagccgcagtgaaatgctggagatagtgcaggccatctacaagatggtgtcctccgtgatgaagatgcctgaggacgagtccacgcccgagaagcgaacagacaagatcttcaggcagatggacacaaacaatgatggcaaactgtccctggaagaattcatcaaaggtgccaagagcgacccatccattgtccggttgctgcagtgtgatcccagcagtgctagccagttctgaggggaatgggcttttggacatttgtgagaaacacaggcttggcctgccatcttcagctttgcttgtaaaagtggatttctccgtgatctctcctgctctcccaggacctgggtccaggcagcaatcgcaccctcctgacctggccaactgtggcttcctcctcctccagtccaggctggctccttccaatggttcaagtgttctcggctgtcgggctccttcctgcccacagagggcctggcggcccttaaggacaccagacaggacttttcagtatcttaccaagaccagctaatttattctatgatcccaggtgactttgtgaggatgaaaaagatggagagtagacaggcaagcccttcctgtgcatggctccacctcccttgttcattttctctgaccaaagccgcttgcatgtatataccgtggtatccttacttttaatatatgagttatttgtatggtgagatggactataatgttcagcccctgtatttaatgcctctgactgcctttgaagcatggtcccctgtggcctgtgattccccccacccccaagtctggctgtgctgtggtatttatgcattcatgatttgcctgattccacaggagatacatgcatgcccagggctgtggacatctgccctccgtcctgtaaatgcaggtgtttctgtgtgctctgtccttcctgtcgattggtatggcatattaaaatgatcaaat

SEQ ID NO: 3130 - protein, 193 aa, Mus musculus
MGKQNSKLRPEVLQDLREHTEFTDHELQEWYKGFLKDCPTGHLTVDEFKKIYANFFPYGDASKFAEHVFRTFDTNSDGTIDFREFIIALSVTSRGKLEQKLKWAFSMYDLDGNGYISRSEMLEIVQAIYKMVSSVMKMPEDESTPEKRTDKIFRQMDTNNDGKLSLEEFIKGAKSDPSIVRLLQCDPSSASQF

SEQ ID NO: 3131 - DNA, 145288 bp, Homo sapiens
gcaattgctcggctgaggacgtgcctcttcaaccttcctggattttgccagattgctctccaaagtgcttttcccaatttacactcctccccagtgtgtgtggaacccaccccccccccccaattcctcctccatccctggcatggctgggtgggaaatgcgatctcactgtgactattttgcctttcctcgtcctggataaagttgagcatctttcttacatttattggccatttggatttttttcttctgtgaaatttctctttcaccttataaaagggttttgcccttcaggtttcctctaatgtcatgttccagcagtacttaagaaagtgtagtccctggctgggatagaggctttaggaggctgaggcgggaatattgcttgaggccagaagtttgagatctccctgggcaacatagtgagaccctgtctctactaaaaatttaaaagttagccagttgtggtggcacatccctgtagtcccagctactcagaagctgaggtgggaggattgcttgatcctgagcatttgaagttgcagtgagctataatggagccactgcattccagcttgggcaacataaccagactctgtctcaaaagaaaaaaaaaaaaagtggcaccccacaggccaggtaaggtatggaggaaaaaaccttccttaggcatctgtagtccaggggctggctcccacctgacatttattatctatatgatttgaggtaaatgtcctcctttctgctttttaaaaaggcgtatttatttttaatgtatgcaactcaggttttcagtatattcacaaagctgtgcaaccatcaccaccactctaattccagaaagaaaccctgtccctactagtggtcacgctcttctgctgtcagcctctggaggccacacattaattgttggtctgtgtggacttgcctattctgggcatttcatatagataagatcatacagtatgtggccttttgtgtctggcttctttcaggtcgcataatgtttttggggttcaacatgttgcagtatgtaaccatatttcatttctgtttatggctggataacgttccatgatacagatacaccacattttgtttatccattcttcaatgatgggtcttggggttgtttccactttgttggtatcatgagtagtcttgctatcaggattcacatgcaagtttttgtgtggacatagcttttcacttttctggggtacatacccaggcacagaattgcagggtcatatggtagcctctatgtttaactttttgagaactgccacactgtttttcacagccaatacaccattttgtatttctaccaccaatgtgtgtgggttccagttcccccacatcctcacctctcctgttattgtccaccttttggattccagccactctagcagtgtgaggtggtatctcactgaggttctgatttgcatttccttggtgactaatgatgttgaacttattttcatgtgcttattggccaatgtctatcttccttggagaaaggtctacttatatcctttcttatttttaaaattgggtcatctgacccaattttacttattgtttcattgttgacttgtaagagttctgtatatattctagatgcaagtcccttgtcagatacatgacttgcaaatattttctcccattctgtgggctttcttttcactttcccaatggtgtcctttgaagcaaaaaagtttttcattttgataaagtccaacttatcaaccttttctttggttgcctgtgctttttggtgtcatatctaataaactactaactaatacaaggtcatgaagatttatgcttatgttttcttctaagagttttatacttttagctcttacatttaggtctgatccattttgagttaatttttgtatatggtgtgaggtagggatccaactttatttttttgaatttggccatcccttggagaatcacttgaatccaggaggcggaagctgcagtgagccaaggttgcactattgcacaccagcctgggcaacaagagtgaaattctgtttcaaaaataaaataaaatgaattttgccatcctgttgtccagcaccatttgctggaaagactattcttttttcccattgaattgtcttggcatctttgccaaaaatcaactgacaataattgagagagtttatctctacattttcaattttattccattcatctagatctctgtccttatgccagtaccacaccgtcttgattactgtagctttgtaataatgatatagtttccccagaggtaaactagaaagcatgtttcttgcttgcctcagaggactatctaggccagtagttctcaaagtgtggtgcctggaccagcagcattacatagaaacttgtcagaaatgcaaattcccaggcaacactccagacttgctgaatctgaaactctgggggtggggcctagcaatcagcattttaacaagccccgcaggggattctgatgtaccctaaagttttgcattcacaggtctctatgtgtgctgtccaatgtgttagccactagccacatatgactatcaagcacttgaattgcagctaatccaaattaagaaatgctgtaagtgtagaacacacactgaatttcaaagacagtagtataaaaaaatacaaaatatctcattcataatttttagattgattacatgttgaagtaataatatgtatatatacatatatgattaacattatgtccatcccccattagtcatggagctatatgtttcagggagaaattcacctactgttccttgcagggcacgtccttggcatatgcaccaggagctctagctcccagaacaggaaccatcatcagaagcagagctggaaaggcaggcagccttttccggttcaaactggtttgaagcagaggtcagagctgctgcttgtgtttggctttgggttttgtgttttagcatgagcgttctgcagccagccagactctgggctactcccctctctccactgacatggaaaagatgtctgtgtgttgtgcggagcccccggctggggcttctgacttccatgttggggcctgagctgccgctgatgtggcgtcccaacctgtactggacaaccatgtgtcatggcctcaggcttgcctccaccccactgtgtaaaccagcaagggcacagaagtccaacccaactctgtggagccactactgtcaccacaaaggggtcccaatccagaccctaagagcgggttcttggacctcgcacaagaaggaattgggagccagtccacagagtaaagtgaaagcaagtttatcaggaaagtaaaggaataaagaatggctactccataggcagagcaggggcatgggctgctcaactgattatacttatagttatttcttgattatatgctaaacaaggggtggattattcatgaacttcccaggaaagacatgggcaactcccagaactcagagctcttctcccttatagaccatatatggtaacttcctgatgttgccatggcatttgtaaactgtcgtggcactagtgggagtgtattttagccggctaacacattacaattagcatataatgagcagtgaggatgaccagaggtcactcttgtcgccatcttggttttggtgggttttgcccaggttcttcactgcaacctgttttattttttgtttttcatttattttttcttttctatgtcccccccattcacaatacagaccaggcacagggcctgggctgaggtgtatattaggtaggtttactctagctcctctttctgtacagccagtgtaagaacgcagcctgtgggtaagtaccaggaggcctaccgcaacgtgttttatcagcaaggtctttgtgacctgtaccttgtgtcgacctcctatctcatcctgtgacttagaatgcctaaccgccggagaatgcagtccagcaggtctcagccttattttacccagctcctcctcaagatggagtcactctggttcaaatgcctctgacactacttgaagatgtgtagtccaggagcacatttcacattttacaaagccatttcccattccttggtgccttggcctccctcccttgggtcatctgagagagagccctcagggggaaaggaactcagagaggttgggtgtctgctcaggtgatgccgatagcgtatgctgagctgggccagcaccggtgggctccgactgatggctgcgatggctttctttatttgtgtgggcagagtggtcagtcagtgggaggatgatgatgagggtgaggacatgacaacgaagtaacatgcccatcacttcttgaggagctacctcaccagaggccctttgcacacattgcctcttttaatccaagcgagacatgattcatatgcacattttacaaattagaaaattgggaccctggattggggcctaatcagggttgctaaagggaatgctttaagtttgctaatgaggaggagggaacagcgagtgggggaggaggaaagcagctgttttttgggtttttttgagacaaggtctggctctgtcacccaggctggagtacagtggcatgatctggactcactgcaacctccacctcccggattcaagccattctcccaccccagcctcccaagtagctgggactacaggcatgcgccaccaggcttggctaatttctgtaattttagtagagatggggtttcaccatgttgcccaggctggtctcaaactcctgggctcaagtgatccacctgcctcggcctcccaaagtggtggggttacaggcattgagttttcttttttttttttttttttttttgagagcatccaatgttagctcatttaaggctctcaacccccccaagaggtagttcgtaggtcaagctgtctactttatagaagagcctgggagtccagggttatctgacttggagtcctgttcattttcctgggtacctccaaaggccgctcggtgagtggacagtgcagttctggagccctcccctggcaagtcccgctccggcccataccccgccctgttccccagcagccacggtcgggtagaggggtcagggaagcagggcaagagggtaaggcactgctcaagaaacaaaaccaggtccttaacgtccctagtcctgccgggcagtgtcccaggaccccggccttgagattagagagaggcagagggcatacggaatgggaaatagaagaaaatgtaccaggacatgcttcctgtcttatgcttagactgccatgacgaaataccacagactgggtggcttcaacaacagaaagttatttctcagagttccgaaggctggaagttcaagatcaaggcactgctggctgattccttttctggtaagggcccactttctggcttgtagacagtcacctttgtgctgtgttctcgcatggcctttccttggtgcatggagagggagaaagatttttctctcttcctttctaagaccaccaatcctatgacttacaactcctttaacgttaagtacctcctaaaagtcctatctccaaatacaattacattagaggttagggcttcaacaaaggaattggggtggtggtggtccacagcaggggaggggatattttagtttatcttgagcttgcaaggatgaaggggaaagagcgggggtgggggggtggcatcggaacctgcctctgagtcacacttcctggatgagccatgggccacagcatctgtatcaggagtggttacaaaacagcgtgcctcagggataaacaagctgacctaatgatccaattttcccagctctggtccatctacagatttgaggcaggatccagtgattctgctggctgacaggtcatggtaaatttccaactctcccctttccaggcacggctttggtttcctgctgcagctgctgctggggagttatcagggcatttcctccgcctgtgagctcctggggtcaggggaaggttgggtggccagagatgctgcctctaccctaagtcagcgtcacccatgctattcccagcagctgcatttctccactctgtaattacaaatgaaactggggaatagaatcaaaagagtacctagaaacaagctagcctctacttcctcaaacattctggggcaggagtttgtgcgctggaacaatgttatttgcaagattctccctggtggatatacactcaagtattaaagtgctacaaggaattaaaaaaagaatagtatttcttccagagcctgtgtgggcccagcacaatgacactgaatctggctgttaaacctggctgttgctgattctaatatgtggccttggacatttcatttttccaagtatagctttcctcatctgtaaaatatggaaacaatctttagaatgtcggagatagtgtatgtaaaggtacttcagaaacaataaagtccaaatcccaatgacattttttgcagaaatagaaaaacccatcctaaaattcatatggaatctcaaggggccctgaatagccaaaacaatcttgaaaaagaacaaggctggaggactcacacttcctgatttcaaaacttaccacaaagctacagtaatcaaaacagtgtggcactggaataaagcttgacatatagatcaatagaatagaatagagagcccagaaacaaacccttgaatatatggtcaaatgatttttggcaagggtgccatgatcacttaatggcaaaaggacagctttttcaacaaatggtgctgggaaaactggatatctacatgcaaaagaatgaagctggacccttacctaacaccatatacaaaaattaactcaaaatagatcaaagacctaaaagtaacctaaaactatagaatttttagaagaaaacttggagcaaaatctccacaatgttggatttggcagtgatttcttggatatgacattaaagacacagacaacacagaaaaatagacaaattggatttcataaaaatttggtgcatcaaaaagcaaaatcgggctggtgcggtgtctcacgcctgtaatcccagcactttgggaggctgcggtgggaagatcacttgaggtcaggagttggaggccagcctggccaacatggtgaaaccccgtctctactaaaaatacaaaaattagccagacctggtggcgcacgcctgtagttccacctactcgggaggctgaggcaggagaatggcgtgaacccacgaggcagagcttgcagtgagccgagatcacaccactgcactccagcctgggtgacagagcaagactccgtctcaaaaacaacaacaacaacaacaacaacaacaacaacaacaacaacaacaaagtgctggcggtgaggatgtgaagaaattggaaccctgtgcactgtttggcagaatgtagaatggtacactgtggaaagtattattatgatgcttcttcaaaaaattaaaaatagaatgaccacataatccagcaattccacttctgggtatatacccaaaacaactgaaaataagatcttgaaaagatatttgtgcacccatgttcgtcgcagcattattcataattgctaaaatgtggatgcaacccaatgatttcttgacaaacgagtgggtaaacacaatgtggtatacacacacatggaaatattactcagccttaaaaaggaaggaaatttggacatacactacatcatagatgaatcttgaggacattatgctaagtgaaataatccagttgcaaaaaggaaatactgtatgattccacttatgtaaggtattagagaggtagtcattatttaatgggtatagagtttcagttttacaagatgaaaagagttctggagatggatggtggtgctggttgcacatcattaatgtatttaataacactgagctgttcactttaaaaggattaagatgataaattttatgttatgtgtatattataataaaagttagaaaaaaattgtcataaaactaagtcagatattaagaacaatcagaattacttctgtcttgtttacagtcatcatatgaaaaacaaattgtttatctagcatgacacctgttatgggttgaattgtttccctcaaaagatgctgaacttctaacccttggtacctgtgaatgtgaccttatttggaaattgggtctgcacagatgatcaagttaagatgaggtcattagggtgtgccctaatccaataatgactgtgtccttatgaaaagggaaaagagacaggtatatagagaagatgtgaattcacagggagcgcacatggccatccataagccaaggaatgcatgaggttaccagaagctaagagacagacatgaaacaaactgccccccacatctctccaaaggggccagccctgccaacactttgatcttggacttccagcctccagagctacaaaacaacacatttctgttgtttaagttgcccagttggaggtgcttgttacattagccccaggaaattatacaacatcttacctgaatttgctttcttctttgctctagttaaattcaaaactacatattgaataacgacggtgtgctctctctccatgaagcttcggggtgggtagacagtcctcctcttgaaggaacaggagggacgcaagggaagggaccaacttgtatctcatctgagagagatacactcctggaataagaggtctgcggttaagtgtgtttctctagaagttcagaaacagaggaagcatctgcgggctaagctgctgagggctaggtgagagctaactgacctaagttttgaaggatggatgggtgacaggttggagggggaagatggaaaagtcacatgggagaggaacagcatgggccaagtgtggaggaaccagtgagtgggctgggtttcagaaacaggccttggtctgcttttgagccctccctgaacttttccaccccaaccccacctcctgcctgtgtctgccatgcacctcccttcctgtgagtctgtggacagactttgcccctttgccctgtgtgtgcttgggagaaatctgctcagtttctgtggcagggatgtttctacgtgttcatcaaaccggctttgtttacttccgaaacactcatgaagaccacagctgccagagccccttgcatcctggtgggactgtgcgactacttctggcccatggatgtgggtggaagtgacgtgtgcttccccaggcctggctcctggaccccaccgacggcttctcacctgtaaccccaccagccttctacctggatacttcacggggagctagagtggccttggctaagaaggaggcatggcacccgcgggtaccgggccgccttcatcagtcggtgcactctggtccaccgcccacatgccttcatgtaatcttcactgtagggcccacagggaggggaacttcctcgaggtctagctttgcctttccgccttcagagccaagtaagaatgaggggtctgggctcggcccaccttccctgcaaggccctgtgcccgctcccctcaaagctggtcttgcatgttgctctggcggcctctgtagcaggagttcactctgttttccgtggaggaggagtggaaggagggattcaagctctcccctagagacgctagaaagacagttttgtctcagcctcatacgatcgcccagctccacatttctggctgtttctgtggttacctttcttcggggatgtttggggcgggaggtgggtgtgtgtgtatatttgctcttctgaagccgtttttccggagctcctggtgggggtgggggtgctctgtccctggttcctctcgaggcaggtgcaggggatggaggatgcccccctccccgagagccaggaggcgccgaccctgggcaggaggtgccagaccggcgcctctcccgcgtggagctcgaagaccacagatgcctggaagggaggagcaccttccgtggttaggtggggaaaccgaggcagaggcggcccaatggactcgcctaaacggcctggggagtcactgcaggtaaccagagctggagccaggcttcccactccaggcccggggctctcccccgaacaggcgtgggaaggggtgcgagctgcacgcggggctggggctgggggtgcggggctggggcaactcggctcttccccttcctaggccgcccgggccacttcctgcggcgtgggggcggggggcgcgggcgcagggctggcccctcccgggcgccgcctctcggcctcttctataccagcaggccagaggccaagggttaggggaacagaaccggtgcccggctccgcccctgtcccgaaagccactgggggctgggacccggcagggccaggtttgggccgcgagggccgaggagcagcgaggtgcaggggctgcgagggccgagccgggcgctgagggtccggcagggggcgtggagggggcggggcccggagggggcggggccgtaggaaacttgagcgcccgcctctggccgcgcgccccgccccggcccccgcctccgggtcccgcctccaggtcccgccttcgcgtcccttccttcccggagctggcaggcgggccgcggcggcggcgggcagcggacgggcggactgacgggcgcctccaccttgctccctccctggctgccggcttccttttgtctttctgggcggcgatgagcgcagggccggcgcagcagctgcgggcgcacggaggcccgcgctgctagtcactcctcccggcctcggcgcgcttgtcccgggcagcggcccgggcccgctgcagccgccgccggcgccgaacttgggctcgggaagccggcggaccgcgtcctgcgccggagcaggtagggaaggggcgggctgcggtctgctggctgctgaagtgtgccccgggcgtgtgcacccggcgtgtgcaccggcgagcgctgcgatccggctctttgcgtgtgtgttgtgcgcgcgtgtgtgtgtccgggagtgcccgcgtttctctgcgcggtggagttgtgggtgactgcggacggtggtgtgtctttcgaatggcgtgtactcgtgggcatccatgtgtgccttaggtgtgcacattttggactgcgtttgtggaattgtgtgtcggggcgcagttgctggtggggagcggtgcctggcgggtgtcgtgtgtgagcagctgtgcgcagagcggggtggcggggtgggtgtgggtggtccagccccacgcccagagccccctgtccctgctggtcggcgcagtgcgtagcttaggagcctcgaggacagctgggacccgacggggcaagcgcgggcctcgcgggcaggctgggccagtccctcaggggaacaggtccgtgcggcccacgtgggtcgcctgtgagcttctgccaagggtgggggcccacgcggaggcgatccgctcgttcctcccagggccatggggcgacgaggagagccctggcctccccgcgacccgcactgcgacctgggccagacgcgccaccttccccggtcgcggtttgcttctctttaaaatgaggacagctcctcccttgggggctgtggtgacaggtgaaatgagaacgcactgaagacagctcttggtccaaagccccgcacacagtaggtactgtgttaattggattagcgtctcctgtttaaaatcctttttttttcccctttatcgtgggtggggccttacattttccccgggcgtgttttgtgcctctccctggccctaacttaaccgcgaagcactgagattcgagaaagtttagctgccagctgcgctgcctcctgcagcacctcccgggcggcgccgcctccgcgagtgcccgagagcgccgcgctgggcgccggccctgccccagcccccaggctcccgcgcaagcgtgggggtccctctcctggccgggaggcagcgactgcggagttgagaaccctttggttcaacaagttcctagtccgggaggatgcagctcagctcgtggagtccgagagtcacggcgtaaaattggcgcttcccgcacatgcagatctcgggctcccggggtgtcccggccgccaaaggccacccctttcctcctggctgaccccaattccaccagaggaggatgtttgccaggacgccgagtccagctgctggcctcggcattagacaacccccagccccagcccctgccatccctgctcccttgcagccagcctcatgccgggggtgccacatgggacacctcctcctagtcccacaccttaatttaaaacatttacttttgaaacctactagtcgtaaaattgaaccgcagtgaacgagcacccagctcttaccacgactcactctctggagagttctggcgcctcggcgctggctcggacgcagcaaggccagctctaggggtcgggtggctctcggccagagcgaaggatattctttcccttcatcgccttggtgtctttctctgggggaaaaaaatcgcctttaaccaagggagccaagatctcaccagtgcaggaggctctcaaaatggagcgccggcatggggttgggctgcggaggggacagcatgggcggccttttggtatggatgcgcttcccaactgtcaggggctacgtgatggtgttcccagagaggcgggctgctttgcgggcttttaggagccagggatagaaacctggtccggttcctttggtttccctcggccgagactgaagccctgcaatcctagccatggcaggccagggggatgcgatgaactcattttctcatttttcatcctgacttagtgacaggggcacacttagaatgcaccctgttttctgtttcatcaaatgattttatgtcctacaagaaaaaagggcttttggtgtgaatcctactctttcctcataatcaggttccataataatattaaaaaaaaaatcagtctggctttctcagctcagaagacagacccaaacccaggtttgtgttttgttttgtttttgtttttttctagttaaagccagccctttgtctcaagcaagccagtgttttggccttagatctatttctgtttcacttttgaaagtgcctgtaattactgagctcttgaggttttattggataatgtggcaaagggaaggcccgggggccctgcctctcccttgcggtgggatgtggtgccacggtggcacgttctagccttgcctgctccctctgcgtcccactttcatgctgtttttaaggtggaacataaatgtcaatgtgtgataacaatttgggagactttgtctttggaatccaataaatggaaggtcctttgatctgtggagaaaccagaacaagtcaaaaccccagaagaacagagatttgcccaaactccagccaatgacccatttatttccaacaagccctcctagagatagattctaagtgaaatacaagaacgtggacacactccgtcccctttctggccacagggctgtgcagaattagaagtgcagtctatggaaggacaaggactggacttcgcttggtgcaaacgccccagccaggcgccccatactcacctagcaccatttcaccctggagctgtttcctcctgttgaagcgctggtgctcacaccccctaccttcagggctctgcaagcacagttccaaggtctgcagcgcgggtacagtgcatgccctgctgagtgtgcgtcagagcagttgtctccctgtgacacttattctaagaccctttttgctactcataagtggtagagtaccacactcactcatgaaccagtgataatccagggtactaacgggggccccggagtttatttggcaccgaagattaagctacttggcagctgaatttttatctagattggggttaggtttgtattaaaattttgcattccagcaagccctaaaccgtgcttgttcattgtgggataatgcgttcaactgatgagttgccaggccaggattgatgggggattatgtgtattctgctagtttgtcagcacctgatgtcactgtgctggggggtgggggaggcatgtttggagttaggatgagcagacacttgtagattttaatcacactctactttggggctccctgctctcctatggtagcagggggtttctgtgtcgttcttatgtcctcatgtaaagctgcacatctgtgaatgtcaggtagctcttgtgcttttccccttagattgagtttctaatctgggaatgacagagggtggctgtatatggagacagcagcatgggcttaggggctcttttggtgccagttaccctacggaaaaaaggtttcttcaaatcactttctacaaagactaaaaaatggttggaatctagtggtgcagattgtaatatgacttcaggtaatcaatacggtttgacaggtggaacatttcttagatgctgatgagcagggcgcaagtctcaagatttttaaatcatctgaaaagcacagtaaatcctttaaagagccctaccttggccatgttgtttcaagtaaaattgaatttcagaggcaaagcttcacatcggaggcatgacgaactaaagaaatccttcccagagacctccactctcttcctgttgccaccctcctctgccagcagcagggcaggaaagatgacttcttggggctgtgtgcctttaccttaagaagcaagtgcaccctgaatgcttctaatcccgcagctgggttgtctgggtatttggatctttttggtgcttgaggtactacccaagttggcaggaagccaggagcctgggggtggaggtgtcttagccccacctgtggcatgagacaagaggtcttctccagcaagggatgggtctctgacccttggctaagaaaactcaggattgttaaatacgtactgcatggataaggttgctgtgaccctgaaaaaaggaagaaggcttttgggtggtgcgtggttctcctcttggaagtcttcccagatttcgcctcagtactctcttgccctagcttaaatctttccttgctctgtgtccccttaggcaagtgaggtctcctctcaggtaggcatgatattaagtgcatgtctagaggacagttccttctacctgcccaggtgcactggctgaactcacctatgcccacatctgtgcattggcaggtgatatagatatacacctgagctgtccccctgagctgcagacctaacactaggtgtgggctccgagctgttccacatcaaaacagagccgaggacacatctccctcactgaagctgtgtctcctacctattatggtcaacacgtctcatctactcatttgttaaagctagaaatctctggagagttttggagctctttctctgtcttcacttgaaatctctggagagttttggagctctttgtctgtcttcactttgccatctaattgggtcagccctctctgagggctcacacccactcttccggcacagcggagccttatctgcccttggcccagagaatgcttccagttccttcactccagccacaccggcagcacttcccagtttaaaacgcagatttcatcatcccactctcttctgcctccccaaccccaccaaaccttggtttgttctcttaacgcagtaagtgcttctgatacctactgtgtgccttggaccaagctggagtctgagaaggttgggcccaggcatcctccctacctgtgcagagtttaaggtcttgggctgggggttgtatgtggggtacctatcaaataagaccagggagcgtgaagtgctatggaggggagctcctaccccagtatagggggctccctggagaagcaccctctaagctgatacctgggagagttgggggtgcaggggaggggttggagttggggctggattgttcgatgcctttcttctgtctcacccagacttccttatctgctaaactcctactcatttttgttttaattaataccaagatagaatttatctctcataaagcatgcccattctaagtgtacagtttaatgattttcagtaaattaatagagttcatagccattaccacaatccagttttggaacatatccatcaccccagaaagatccctcttttgtacaaactccctgtccccgtcctcaagccgccagtcccccacagatttgctttctgtctctagatttgccttttctttctatgtttcttagtgtgttttcataggttcggcccaagagctgtttcatttgggccttcctagagtcttctagttagaatcaatttatcccccagcaccgacgaagtgagctgggtgcttggccatcccgctgctagatggcgagctcccttacctgcctctcctgcctgcacctggctcagcactggcacctacagaatacccaaggtgtgttggctggaccagctgaagttgtgttcctcacatttcttttgtataactcctgagtatctagcagagtgtggggatttaaaatacagcgcatgtattgatgtgtcaggtgatgtgagccctgctacatacataccttaacttgtttcatcaagaacttgtgaggcaaatggcaaatcaaaaacaaaaacaaacaaaacaaaacgaaacaaatctattttctaagccaggcacagtggctcttgtctgtagttccagctactagggggtgctgaggtgggaggattgcttgaaatcagggatttgagcctgggcaatattgtgagaccctgcttcttaacaaactttttttttttgagatagggtcttgctctgttgcccaggctggagtgcagtgatgtgatcccagctcactgcagccttgaactcctgggcccaagcaatccccctgccatagtctcctgagtagctaggactacaggtacacaccaccatgcctgctgatttttaaattttttgtggagacgaggtcttgctatgttgcccagactggtcttgagctcccgggctcaaataatcctccagccttggcctctcaaagtgctggaattataagtgtgaactactgtgcctcagcccaagccatttttctaaatgaaaaaactgaggaggcccagagcaaataagtagcccaagggcatcagcagaaagtagaaggatcaagaattaaacgaggtcactttctcttccgcccttgttttggtagtaatgatatgcccttttatggccttgcctgggctggtgttcagattttcctgtacgagtcttgtcatcccttcctaagccatggaagctccttctagggcatgagtgctgtgtgacacatgttcacacagtgttgccccagtacctacctagtccacaactgaacaggtagagatggttcaagcaatgtgtgtgtgtagagaggtctcctggtaaatagaaggggctgggggagggcgttgaatgcagtggtgctgtggccttgggtggcttggtgcatttctgatgcatttctcaccttggatcattttcactctttgaggaagagagcagaggatgagatgccatttgacagatgcacaaaccaagacacagaaattgtatacccattgtacgccaggtagatcacaaatgaccgttctctcccatggttgtagagaactctcatggtggacagaaaccatgaaagaaatcatggtggaaagaaccaagacattcttgaatcggagtattagaacctcatttgcaaaataccttggaaagatcagggacactggggtttgaattgtagtctttgctctgttgtttattggctggtgatggtctctgaatctgtttgctcaggtgcagaaaggggttttaggctgagctcagatattgacaggaactacaattcaaacccaggtctgcagatgtggcagactgggtttgaactgtagtctttgctctgtttactggctggtgatgttctctgagtctgtttggtcatgtgcagaaaggggttctaggcgcagctcagacgtagatggggacgcagatgtgagtacctaggtgagtctggctggtcacgtgtggaataagtggtggtggctgccattactctttaagcattcttggatctagtgcctcctctgccactgagtacagaattccttttcaaattcgggcttatgaggcatgttttgatccaggctgtcgtagcaagggatttgatgctggagtctgtgactgctgtgcgtgtggaggcttccggaaggcagccagtgctggttactgcttggagtttggggagctgccattttggattgtcctagcctcatgccttctgagaagcatctgtcagggtccctgatgcacctacagagaccctgagcttggtggtgggggttgcacagagagagctgcaggttgttcctcaggcataacgaggcccggagctggtggtcccctccctctgtgagtgtgtgcagagcatggatcgggtctgggagtgttcgtgctggcaggccggaggaggactgctgggcacacttgcagaattgcggttctgtacagcagtgtgtatcgactgcagcgctctttttctctagcagcaaaatgctcagctctctgccttctttctgtgcatttaacagacgtttccagaaagcagaattgatgacagccccaactcctccctttcactcccatcttttctatttgctgccctgtaatcaatttttggagagaagtgagaacctctcaaaatcgatcacctatgttgaaaaaaaatcatttttaacatcatgcagttttccgtatttactgtgtgtggctggagacactcctggcagaatgagtgtgggatgtaggaggtccagaaaagcccccagcttcaggggctgagatagggccatgggtggcagaactggttgtccccccgccccccaatccctcagcagtggttgaggtgtgctttattagaaactcttcagtcatgcagtttggagcccgtgctggtgatgcagcctggatgcctggcaggggcttagcctccaggggtgggacatgagatgtggctgccgtggcttctctgtgtctttcttcccagcgagtaaaggtagacgcagggctctggcaggtgctaaggccctgcttgccttcatgctggaatgctggcaggtacaatttattcttatttcttaggaggtgctttcccctcttctttctgaagacatccagggataaagaattgctgcttttatgagcacatgttcttggtgatatgctgttaccttatctaaaaacaatacggcctggctgattattctcagagctcattgtaaggtgaaaggttatgcatttgagaattattttcacagtgtggatgggagtggggggagaagatgtagagcacaggtaaggaattccaggttttggggccagggatcgccaagcagtgtaaagggctcactgtggcctgtagctccttccccctgtggtttgtgctgggccagttgctggctccccaaaaccattatcaccattatcattatcactatcatatccatcacctcaccatcattatcactgacatcatcacttttctccatcaccatcatcatcatcatcactatcatccccatccccatcatcatcattaccatcatcattgctgtcgctatcatcatcatcattccattcatcaccattcatcatcactgtcatcatcaccatcatcatcactgtcatcaccatcaccaccaccatcatcaccatcgccatcatcactgttatcgtcaccattcatcatcactgtcatcatcatcgtcatcactatcatccccaccatcaccaccatcattatcaccattctccatcaccatcatcactatcatcctcaccatcatcaccattctccatcaccatcatcatcatcactatcatccccaccatcatcaccatcaccatcatcatcactgtcatcatcaacatccatcatcactgtcatcaccatcatcatcactatcattaccatcaccatcaccaccattatcactgtcatcatcacctttctccatcaccatcatcatcatcatcatatcatcatcatcatcatcatatcatcctcatccccatcatcatcaccatcaccaccgtcattgctgtcatcatcaccattcaccatcaatgtcgtcatcaccatcatcatcactatcatcattatcaccatcatcaccatcaccatcatcattactgtcatcatcaccattcaccgtcactatcatcactgtcattatcaccatcatcatcaccaccaccatcaccatcatcactgtcatccccatcctcatcatcatcaccatcactgtcatcatcatcaccatcaccaccattgccatcaccatcaccatcattatcactgtcatcatcacctttctccatcaccatcatcatcatcatcatcactatcatccccatccccatcatcatcaccatcaccaccatcattgctgtcatcaccattcaccatcactgtcatcatcaccatcatcgtcattatcatcattgtcaccatcgtcaccatcaccgtcatcatcaccattcatcatcactgtcatcactgtcattatcaccatcatcatcaccaccaccaccatcaccatcactatcatcgtcatcatcatcactgtcaccaccatcaccatcactgtcaccaacatcatggtgcttctcaacctttgggctgctttgggtcgtgcttgacatggcacattcctggtgagttagctgttctttgggggttttctactgttggtgtggtgattagggtagtcaggacaggatgagtataggcatagagaacccaagtggatgatggtggagtgtgattcttctgaaagggtcttcatgagaaccactgatctagaagattctgggagaatctcacgtattctttcaggcccaggagtaagccagtgttacctgctctgtggagctctcctttgtccctccagggaggacaaattctggctggagcctgaccttactgcttgtccatctctcccagggtggtaggccactttaggtaggaccctgtggatttctccttggtgacccccgcattctgggcacagagcctggaacacaatgtctgcccagatgtgtgactgaaccaccccccaattccttaactgtaggatggcggctgccttcattagaatcttaacaccttgcctgagggctggctttgcaggtctgagtggctaggtcagggcactgctagtgttttctatgtttgtagtcaattggtgagagtttgttttacgcatttgttaaaactgtgggacagtggtctggaagccaacaaggctttagggttggcagagtgactcccatcccatcattgatgtctggctttgacttggcatgggagacattgcctctccagatctcagttctctcgtttgacaaatggggcttagggttgaacagcctctaaatcctctgtcagctctgcaattcaggaaagatgtttaaaaatgcatacttgcattgtaggtacatccaacatagagcaaagagagaattttcctagctaaattgactgcaaaaaaatgaaacctcttgggccgggcgtggtggctcatgcctgtaatcccagcactttgggaggctgaggcgggcaaattacgaagtcaggagttcaagaccagcctggccaacatggtgaaaccccatctctactaaaagtataaaaattagctgggcttggtggcgggcgcctgtaatcccagctactcgggaggctgaggcaggagaattgcttcaacccaggaggcagaggttgcaatgagctgagagatctgagccactacactccagcctgggtgacagagcaagactccgtctcagggaaaaaaaaaaaaaaagaatcctcttataatatgcaggcatcttagcaactgccatcttagcaactgccatcttaagaggcagcattatgattcagaagaaactgataacattgaggaatacatttgtggagcacagattaggagagattggtgcaggggtggggggtggcaggaagatattaaggttggaatttagggaggtgagctctgtgggttggtttcatgcatccagctcaccattcaacctttcctgttaacttcctatattaaggaggctgagattaagaagacagggactcgtggcgtaagggcgagacagacatagaggtgagtgactgcagtgggatattcactgtggaagcattgaaggttggcagtcagctagattcttaggctgtagatcgggggccttatttagaagctgtttactgttcccttaagaggatcctctagcaggaaaaaccactgctagggttgttgctttcctcattataatgatgtctttatgttcgtcttaggaggtgatagtactgattatttaagaaactggtcagccaaacttcttaactaattgtgaattagagaaaagtcagaagtagggagtattatagagataagtaattgtattattttcagacaaaagtatatgtagtaatgtaaactactgaccagattttgtttcaaattgttttttttaaatgaattgctaagaattatttgaaattagcacattagcggtaataagatagtagatattagatagattagattaggatagtaggtagtagatgtaggtataaagagactgaaaatcagctgtttaaacatttttcccaaatgtggggctaggaagcaagataaagaattatgcaggccaggcgcggtggcttatgcctgtaatcccagcactttgggaggccgaggcgggcggatcatgaagtcaggagatcgagaccatcctggccaacacggtgaaaccccgtctctactaaaaatacaaaaaaaattagccgggcgtggtggtgggtgcctgtagtcccagctacacgggaggctgaggcaggagaatagggtgaacccaggaggtggagcttgcagtgagccgagatcgcgccactgcactccagcctgggcaacagagcgagactccgtctcaaaaaaaaaaaaaaagaattatgcagacagtttcatttcatttatgtttggacggggaagaaagtcagaaaatagatgggaaggaaacatatctaaatgttaacggtggttgtattccatgggatcatgggtctttcttgatttttcatgttttgccacattctaaattttcaccagtgggcatttattatttttgcaattagacaggaaagagcctccaggaggaactccaaatacccatcctttatttaccctcttaatttgcttaccaaactttcttgttatggttagactggctggcatccataatttccatacttgtgattatttaaattaatggaaatttatcataatcccttattaaaatttcttcgctgcactgaaattcaacactgagcaaatctgttacctaggacataaagaaaaacattcagtccacgtgcggtggctcatgcctgtaatcccagcactttgggaggctgaggcaggcggatcacttgaggtcaggaggtcgagaccagcctggccaacatggtgaaaccccatctctactaaaaatacaaatattagctgggcatggtggctcacgcctgtagtgccagctactcgggaggctgacacatgagaatttcttgaacccaggaggtggaggttgcactgacccgagatcaggccactgcattccagcctgggcaacagagtgagacttgctctcaaaaaaaaacaacatccagagtcttccaggaaatttaccgtttcagtgtggcatagtgtagagtttgtttattatctagaatatggtttttcttttttgtgttcttgaacttgggcgttcacttcgtttgttgacctggaaggagccatctcggcgcctgctgtttgaaccttgggtattttaatgaagtggtttgatgtcctgataccaccagcccctgctgttgcttttcacggccctggcttttccaggaataatctccttactgtttgtcattctaatatgtttcagctccctttttgaaaataactttttctgctccccttccctgcccattcttcatgacccccagagaatgggcctgctggtctctagcccctgtgaattggaagactcctggcgatgatccttctttttctctctgtgactcaggcggttgatgttgggttgaccgtatttctttgctggctggtaagcagggccacctcagcccttgtgagggccatgcctgactttcaatggcttccctccaaaggcttcttaggccgttcctccccatcgtttttcagaggtttaatctgtttgagtccaggatattgagtcagcagtggaaagttatgaagatgaggccagccatcagaaaaattggctaatatgaaagattaattccagggtgaacaaaggagagggatgctggggccgggctgcctccccaggcaaatcacatcactgtaaaatccgagaaaccagaagttgcctttgctactcactcagtggctgcttgctgtttcttggattagatattgaaagaatcccatctttatagtctactgttcatatttatggtctggagaagaaaatgtaattttcagcaaaattctatcacgtctggtaaataatttcaggatctttacctatgataccacattaaaaaaaattcgtatggcttcagcattcagaaattgttcttttcaaactctgggccctcgggttattacaagatttaacaccgaggcaggaagcctgctcgcctatcactggagacaggtaggttgctatggagaccaggtgtgtgtccctgcggtttcctgggtatcccagttgtcctggaaaagaaatcagctcactttatgtgatatttctgcaatagtgtgtgtgaattaagtttttctaaacacagatcagatgtttttgttgacttacagtgtgatttctgacataattttgtcctcggttttgttttgcttaattatgaatcctacataaccctaccttttcctatcagaagcacttccatgcatcaagaccccctatccaaaacagccacaacaacttcaccaacaaaatctcttaaagctagagatgcctgctttggtgtgaatgatgattaccccttaaaataattcaacaattttttttttttttttttgagacagggtctcagtctgcctctcaggctggagtgcagtggcgtgatctcggttcactgcatcctgtgcctcctgggttcgagcaattctcctgcctcaacctcctgagtatctgggagtaccgggatgcaccaccatgcctggctaatttttgtatttttagcagagacggggtttcaccaggttggctaggctagtctcaaactcctgacctcaggtgatccacccaccttggcttcccaaagtgctgggattacaggtgtaaaccaccatgctcgacctcaacaattattatatatggtttgccagatcctggcctgggcactggggatgcaagatagagcaagaccattggaggccctgccctggcggagcttgtattagggttgtgatcctagaccacatgaagcccacaagggggccctgggctgacccgttcctggctcacattcactgtcagccacagctaaacctcggggcctggaacctctcttgttgtccccatgggacgagtgggcacatgccttgttggatggacaataacatcatctgtttttgtttgatgtgttattattcagaggcatttttcagaatggagaacagtgccttatcagtctgcttctgataattttatacatgaaaaaaatcctatttgtgcatattcttgggtctctccccatttctaaaggcagtcaacttggtggttggctgtaaaaagctctttacacttcctaggacttgtcaaatattgacaagtctttctcctttcatccagttcagcaccagcatcctcaaactcactgaaacagagcatcccacagtggcagccactgtaggccccaggtgggtatcctactcctccacccccgccccagactcccccaaccccagctcgcacctgcagaagttacgtctttgcagttatttcaggagaaaaaggcggccactctttctctcccttctttgggtttgtgttcagcaagggtctactgcagtcccggtgccggacagcctgttttgcccatgcttgttaactgatggggtcctcaagtggccttgtgacaggcctgataaggccgcacgtgggtgtggttagagttgatgaccgctccggacattggcgatgtgaggaaagtgacagactccagcctccatgtgcagccggtgattggccgggtgggctcggttttctagtggcaaaggatgctgtgatctgaatgagaaaacaaacctcaggccccaagtgccacgggcttagagacttgagaggaggtgcttgcaactccatctgggaggctaagggcagccaagagctgctgtcttgaggctgacccactcccttgcagtgtaatgggtagtgaacaggccatcctttttaaaggaaaataagtgcctccctatggactctgttcctatcctgctaccctccctgaagcttgaatagcacccacccgtgccttctccatgccggcccttgggtctgccgggaccactgccatgcttttgatggacacggccttgtagcgtctatatcctcatctgtgaaatgggaattccacagcctccctttcgcaggctgcttgtaatagttgccattaaacctcttctgaactctaaagtgctgtatcaatgtaaggaccatcatcaacatcattgtcgtcctcatcgtgagtctttccaaattcacctcctgctgccccagcacgggagtgtctgagactgcaggtttccttgatgggttcctggggcttcccttgtggaaatttgagttctgagccttctgcacttttccatcccccagtctggagtcaacctgtatttttcattttccctctgcaagatgtcagcccataggagaggcctggaggcttgcaggggaaatgggacgatgtttgaaggaagcccccgtgcctgtgggagcatgcagcctcctccgtctttttgtctgccaggcaggggagtaatttgccgttatgtactgggcagtctgggagctggactctcagatgaaaaatgcttgttcaagcacagacagccaggcatggctcaaatcagagcatcgatttagcaagcagctctgctcaaacagccagctgtgtgatcaccttttcaggggatgataggctgacgggcaggtggggtggggtggggtggggtggggtgggcagactaatacagggaccctgtgtttgggagcctctgtttaagcagagaccgggcctggagagagtatccctgggtagggaaaggtgctctcacattagtgggttccacctggccccttggtggagctcccattcattcattcactcattcactcattcattcacatcgtgtctactatgtgccagtctctgtgctaagagagtgatccaagcagaaggtctgaaatcctcagggattcgtttcccagccgacttatgccttactaagtggagcaggttctgggctgcaggggactgacttgctgctgcaggtctgggtcttgaactaagggagaaagacaatgcccatcttcttcttggcgcagtcatttgaggagaggagcatttgcttcttgccaacctgcctgcctgggaggccctcttgctcctgcagccccccgagtcccctttgcagctcccagtcttgcttggggttgcctcctccaagaagcctcctgggctagctcaggcatcctgtggaggcactgctgggccactgatgcctgagctcctgtggcctggctgtctgcagggcttcagtcctggcctttcacttcccagacatgagtcttatctttccacttggttagggcctccccacggacatggacggatatggtttggatttgtgtccccacccaaatctcgtgttgaattgtaatctccagtgttggaggaggagcctggtggggggtgattggatcatgggagcagagttcctcttgctgttctcatgatagtgagtgagttctcacgagatctggttgtttgaaagtgtgaagcacctccccctgctctcccttctgctccagccatgtaggacgtgcctgctgtctcttctgacgtgattgtaggtttcccgaggcctccccagccatgcttcctgtgcagtatgtggaaccgtgagccaattaaacctcttttctttataaattacccagtctcaggtagttctttatagcagtgcgagaactgacagggaccgtgtgtttgggagcctctgtttaagcagagaccgggcctggagagagaatccctggggagggaaagctgctctcacatcagtgggctccacctggcaccttggtggggctcccattcattcattcattcactcactcattcattcacatagtacctagtatatgtgccagtctctgtgctaagagaatgatctaggcagaagacctgcccgctcagggcttctgtttctagctgggagcaacaacagtaaactaaataagcagattatattgtataatatagtaatacttagaaggtgatgagactgtggaaaacaatacattagtgaagagggtgagggtattggatggaagagcgtgagtgtattaggccgttccacattgttataaagaaatacctgagacacggtcattaataaagaaaagagatttaattgtctcacggttcttcaggctgtacaggaagcatggtgctggcatctgctcaacttctaaggtggccttgagaagctacaatcatggcggaaggtgacgggggagcaggcacgtcacatggagaaagcagaagcaagagagagaaaaatgcaaggtgccacacacttttaaacaaccagatcttgtgagaactcactatctcgaggacagaaccaaggggatggtgagaaaccattcatgagaaatccacccacatgatccagtcgtctcccaccaggcctcatccccaactctggggattacaattcaacatgagatttggttgagacatccaagccgtatcagtgagagatgcagtttttttttttcaggggaaagtgttgttgttgttgttgttttaataagatataatttacataccatataccatgaaagtcgccatttaaaaatgtacaattcagttgcttttagtatactggcaaagttgagcaccagtagctactaatttcagaacattttcatcaccccagaaaaaaatctcatagccattagcagtcactcctcaatctcctcgtgccctaggccctggaaaccaataatttactttaggtgtctctggatttgccacttctggacattttatatcaaggaaatcatgcaatatgaggccttttgcatctggcttcctttaccaagcacagtgttttcatgcaccgccaatgctgcgtgtgtatctgtactgcatgcctgtagatggcggaataatattccaatgtatggatagaccacattttgtttatccattcatctgttgatgaacatttgggctgttttcacttttggctattctgaacaatgctgcgaggaacaagttttttttgtacaagcgtgcaagttttttgtggatgtatgttttcatttctcttaggcaaatagagagacacaattttactttttatttattttattttttatttttttagagacaaggtcttgctctgttgcccaggctgaagtgcagtggcgccatcatagctcactgtagcctgcaactctatggattacatgttcctcctgcctcagcctcttgagttgctgggactacaggcataccccatcattcctggataatttttaaatgtttagtagagatgagttctcactagattgcccaaattcgtcttgaactcctgggcttaagtgatcctcccaagttagccttataaagtgctgggattagaggcatgaaccactgcacccagccacagttttaaatagggtggtcagagaaggtctcatgagaaggtgacatctgagcaaagacttgaagaaaataagggcagaagccacacgaaaaccccagcaggacagcaggtgcaagggaacagcaagtgcaaggatgcttccaccaaggggctggaaaatgaaaggcttgacttcaccagctgcctcccaaccagggggcccagtgagtttaggcctcactggccctttctggctgaggggcagcctgctgcgaggggtttccctttctgaataaagagtcaaagtcccaagacagatgatttttgacccatgcatcttcttcctgcctggaaagcagatgtgattcctggagatggggcagctgttctgtggccatgaggttgaaatccatgtgctaaagacagtagagcagaagaagactgggaccttgatggcattcttgagctaccgcctgaaccttggatctcctgcacctgaactttgctctgtgacacaaagaagaccctttcttatctaagccactcttatctaagccaccgcttgtcacgttttatgttgtttgcagccaaatgcattcctcattgatggaatgtccaacattgtccccaagtcccccagatagatccctgggggctcttgacagacagacagcaggcaagcctgggacacacgctgcccccttctgctttcctgtccctccatcgtgttaagctggtctctcaggtgggcatcaggattcagctatcccaggctgaccctgaggtccaccatgactgtgctgcagccaccaccactggccgcttcatggcatgtttccagcacaactctctgacctggctcccccggttccccagacgcgttccccacggagtcccagcgtgtatgcatggggtcacggtgctccacgctctcaaccgttggttgcaggttcccgtccagcctctcaagctggctgctcccctttctcagttgtcccctgtgcctcttgtaccctaacttcagtgttagagcacctttcagggggaatggcgtaaaaaagccttcctttccagtagacagagtgccctggccagcagaggccaaacacattcccattcagctttgtttcatgctggatctggccccaggcctgcacctggccctggcagtgggcgcacgttaggtgggattgctgaagacaatgggtgactgaggcagttacaggtgtcagccccagatgaggctccccaacctgtaccctttaccctggagctggccccatctctcacagcccagtggtgtactaccttaggtaagcaccagttgcgcctcactctaatgaaaataataaaagctcaaatgaccagcactgtcctactgctttatacgcatgacctcaggtaatgagaattagcccacatccattcattccacaaatatttatggagtgcctactgtatgccagggattcttccaggcactggggagacatttaaaaaacaataacaacaacaacaaaaatctgcgtcttgtcggaacttccatatacacttccactggctacttcatggaaacatctggaacatctgatttttctagtcttcccattactaaatgtggcacaagaacgtagtctaaaggatgtacttcaccatgcaaaagctcttgtcatttcagaaaaggaaggagaattaagtaaaatgtacttcaagaaagtcagttaagaatttttccagttaatgaaaatttaaaatgattggctttcatcttgctgttttccagggtcccactattaagaactcactcatcctgttgttattaagggtgaaacccagacatttccttatgtaaaagccaattaaaataaattaaatgcaaatactgtttcattgtcatgtcagttttgagaaccggatcaatcagaggttgtggaaatgccaaagttgttaaggctgtggttaccatgacaacagctctattgtgtaagtggtctgttatttgggaattcttccttaggtcaggctaacagtgatgtcatttctcagggaaggggacggagttctctggagtcaggtctggggccaggagacctggtgagcaaaaactggggttcagccagaactaccagttttgtgaccatgggagacagtcccttccccttttgcctcagtttcctcgctttggggatagccattgcacagctgtgagtatattgtggccattcagcacttctcaaaagttgctgctctgctaaaaaattttggggattcctgatttgccggctggttttcagcctatgttttggggaaatgcaaatgataggaaaccacccctggtcctgccttaccggttctagcagacctttggtgaaactgggagttcttgggtcctcttggctagtggctagtgaatacctgctgggggagggggtgtttgctttgctttgtgttgggggtggggttgttattggtttttacattttgtttgcaatattgggtttgctggtttttgtgttttttttttttttttttttttgagacagagtctcgctctgtcacccaggctggagtgcagtggcatgatcttggctcactgcaatctccacctcccaggttcaagtgattctcctgcctcagcctcccgagtagctgggattgcaggcctgcaccaccacgcccagcaattttttttttttttttgtatttttagtagagacagggtttctccatgttggccaggctggtgttgaactcctgacctcaagtgatccacccaccttggcctcccaaactgttgggattacaggcgtgagccactgtgcccagccgggttgctgttttagttggtttttgattttagagagagggtctcgctctgtggcccaggctggagcacactggtgccgtcggagcacactggtgccgtcatagctcactgcagccttggccccctgggctcaggcgatcctcccgacatcgtaattacatttttgcagggttttcagttcacaggtgtgctctcccacatccccatttaagtttacttatttttcagccccagcctctgaggctatcattattttacagacgagaacaccgggactcagagggtgatttgtccctagtctcagggctccaaggcggcagtgccagcgttggtgggggtccccagtgccaggccagggtggcactgttctccctgtgcctctctgcttgtccccactgcctgcttctgcagaggcctgcagaggcaaccttcctcgccagcatcctgctaagcaggccctggagggcggtttccctgcttccccacaccgggccagagctgccttgatatttatttcagggcatccctgcagagggaactgctaatgcagtcatggctttaagacgtcacaagccacagctgcaggtgcttcatcttaaacatctgccttcctggctgggagaagcccgggagcacctgctgcaggtgtctttgcacctcggtcctgctggtcccaggcccagctgcggccaattagcacctctgttgggcaccatggccatttccttgctgcatgggagccgctggcctttttccactgtgttgggggaaagttgttgggaaatgaggaagcagttggggatttaaaaactctatgcaggaaataggctgttgggttaacatttaagccactgaacagtcatggagtgtttgcttggaagtgaggcccacgaggctgcagagggccatgagattcaaggatggtgttcgtcaggcctgtccgtcatcctctctgggctcgacaccatctcagggtactcatgcctgttaggtgcttggtgaacaaaggcatcccagacagaatcaacccagaaggaagaggggtgggtggtaaacgttcgttaacttagccatgttctcttagggtttcttctcaaaataagggcagatgggagatctccctgcctcaaggggtccctggccaaggggctacaggcagatattgcccagtcagccccagtgaggtgacagaaggcgggaggtggcttcagtgtgtttgaaggaggctggcatcacaggttctaaagcagatggcaggagccctgtggctgggcctgcttcagaaccttggctggctgctccttggaggtgaggtgggggcaggcagtgttggctggagacttgtggggggaattggccgcctggggtgcgtgctggcctgcctgccttccgcttccgtgccatgagccccttgttctcagctgtgaaggtaggtgaggctgccctgcaccagccagcagactgggttaaggtgggaatcaaaggagaggaggtgttcagctggctggagacctgctgagccccttgcatgaggagggatttctgtccagcgcccctggtcctcaagctcctcctcagcagcgttcatgagcacagggtgtgggtgtgactggtccctttgggcagaatctgagagtgcccccttctccctccctgtgcatttgaaagttggctggtgctcgctgacagatgccgaggctcccgtttggcagctggccatggcagccgcttgtcctccactctccctagatttggctgagctgggcccctgctgtgccccacatgccccggctctttgtctcggttgtccctttggctcagctctgggtgtcggctcctcggaagcccttcgtcacccaaccagagtgaactccttctcccaggtggccagagcatgttgaggtgaccctgactttcttctgtgggtcctacattttagcggggagtacaagtgcctcttcactgcagcatctcctaaggaagtgagcctgtggggaggtctctgatgctactgggaatccagcttcaccttcccccaactcctgggatttgcagccacagctaagagtgggagaactttgccttgtttgcattgctccagatcgtgttaaacagaatttcaaaacatgcattttgtaggtagtagttctgtcatccagaatgtgtaaagtaactctctaggtagctgttatggatggcctgcaggaaggatcataccagtgacttcttttgagccccctgccgagtggctagcgtcaggtgggggattagactctggttctttgcttcctggccctgtgagccccaggcaagtcagttaacttcttggagcctcagtttcctgacatgcaaatcatactgacctggtaaggctattgtcaggattatatgagctattatatcctaaagtatattatatcatactttatagagcgtagtatatattcaagtaactgcatttgtgttagttcctttattttgttaacatggggatcaatggctttttttttctgatttggtatttattttaagactaggttgggaaccaattttccatagtcatctgtgggtataagtactcttaccttcagccaggacttaattttggccaagagccttggcttattccagcagagagtggagttatttagagccaaactgtaggggactgaattctctgtgtagcactttctgcagacagtggtaacattaatgacttactgcatatacattcataagtgggtgatttatggttagccccggatccataactttcatttcctgactgatatatcagaagcttcatgtataaaggcgcattagatttagtaagtgtaaaagacttaagttgaggtcatttctgtccacaagctgttcatggtgtagctgttcatgtagctcagctgtgggaatggcctggccctatgtgatgcggaaagacagccaagggggacagtggcacatgcctgtggcacttggttctgtgtgtggtctcctttgtatccccaggaactctctgcaataggaaggtgatggccaggatctcattttacagaggaggacactgaggcccagagaggttaagtgacttgtctgagggttaacagctcctgggtggcaggatttacattggcgctcagatgcatctgaaccccaacctggagtggtgccagcacagagcaggtgttcagtaatgtttgctgacctatgtgatggttaatatcatgcgtcagcctgactgagccaagggatgcccaggtagctggtaaagcataatttcaagttgtgtctgggagggagtttctggaagagactggcacactgagtaaggatctgccctcaccagtgtgggtggatatcatccaatcattgagaacccagctagaacaaaaatgtagagaaagagtgaatgtgctctctctgcttgagctgggacacccaccttctgctgctcttggacatggagctcccggttctcaggcctctgggcttgagctggagtgactccaccggctctcctgagtctccagcttgcagacagtaggtcttgcgactcttcagcctccataataacatgaaccaattcctcataatacatttctgtctgtttatttctatatatttattggctctgtttctctgaagaaccctgactaatacttccccatctgaactttctctgccccttttgttcgacatgtggggggttgctggggaagctaattagaatacaggttcctgctgacaccccacccccactcccttccttcatcaggatcactagtggtgagcctttaaatgcctgtaagctgtccgaggggttcttcctaaattaaattaaatttttaattttaattacttaatttttttgagatgggatcttgccgtgttgcccaggctagtctccaactcctgggttcaagtgtcctcctgcctcggcctcccaaagtgctaggattacagatgtgagccgccactgttggtctctaggggttcttatgcacctagaatttagagactcattgctccaagcttcattgaatctttcctgaacagtcttgtgataggcgggataactcccacccctcagatgctcacatccgaatccctgggacctgcggatatgttgccttatacggtaaagggctttgctatgtgatgaagattgaggaccttgaggtggggacagtatcctggattaccagggtgtagtcactgtattcatgtaagtccataaaagtaaggaacctgtcccagctgcagtgagcccgagggaggtgtgactctggaagaagacgcagagatgaaacactgctggctctgctgacaggaatggctttgagccagagtgtggtggcctacagaggctggaaaaggcaagggaacagatccacccttaggtcccccagaggaaccagccctactgacacagtctccgtgggacctgtgtccacagacagaactgtatgaaaacacgattgtggtgtgtaagccactaggttgatttgttacagcagtgacaccgggctttgtctctgcttttgacttttcctccagtgtgatcccttcccctgcttctgacccgtggatcccagccctgcccaggcccagatcctgggctccaggtgggcctgggttggggctcccagctgcaggaatgcaaagttcatggttctacaaagtgctttgaggtgacgttggtcacatcagctcggcctcagatttgctgctttttttctaaagaagagacagctccaggccctgcctgactgacctagttggggatgcaggccgaggccatatcgagcagggtaagtttccaagaatctggctttaggattagtcgggccacacggaaggagttcctggtctcgtgacacctgcacaaatggtcttcaaccctcaaaacacttcctgttatttaaatcttggtcctttgattttttttttttttccttttagagactatgcacaatttatgtggcaagctagagatgctttctttttcagagcggcctttatgctgtgttcggggctgtctgtcggcgccacagggaatgggggctggtgagtcgtgctcagaaggtcccagtctagatgcttctgacatggacaaaaggagaattcctgactttttggtggatgtttgcaattcccagaatgcttattcttatttagtcctcataggagagtggcgaagggcagcagctttggagcaagggccaccctgcccctccccaccaagccctgagtcgtctaaccttcccggtgtattagtcagctctggctgctggaaacggggtcatagtctgggtgccttaaacaacaggaattcttttttttttacagtattggaggctgatgtctgagacagggtggcggcagggttggtgtcacccgaggcctctctcctcggctccgtgtagccctttctccctctgttctcacacggccatccctccgagtgtgtctgagtcccagtctccttgtgaggacaccagccctagatcaggagccacgcagtgacctcattttaccttcatgacctcttcaaagtccctgtgtccaaatacagtcacatctggaggtagtaaggattggggcttccacataggggttttgtgggggacacactcagtccacgttaactcacttcctgcccacggcaggggctctctgtcagtgtgtctccgactgcggaccccgatcatctttgtgagaatgcaggttcccaggcccacaccatgctggttgagtcagagcttctgggtgcagcctgggggtgcagcaagcccacccctgcattcggagagccttagcgggaagcctgttgcttgtgcctcctttgcagccccggcctctccagttctctgtgtcttgccatcttggcttcttcctcatcccgcctctcgctccatctcgtggcctcccatctgctctcccggctgcaggagcggtttctctaagccttgcaagtgaccgcaccctcttactgcatgcgggccttgccaagagcctgcagagggcggggcgggctctggggacagcctggactctcctgcctgcccccaggtgcccccggcccagccacagggtgctggctgcctgttactcagcacgtccgcctctcctgcctcctgagcccacaggcgcccttcctgtcacccgagcgccctctccttcctcacctcgccacctacgcatcgtcacccctcctcctgcgtttcctcctgtctccccggggagctcggagttctgcaggcacggggctggctcctttcttcatgtcccttgtcccacaggacaccgtttctgaacccaggagacactcaggaaaccttgctggtggaacggatgcagcagcgaggttttccggggcaggaacaccctcccaggagcttttccacggccaagcgctggctggtggtggagctgcgctgaagtcagtgtgtgctttgggcccagctgcactgtgcccggggtccagggatgggtgtgaggctgtctgccccccactgcacgcccggctgtcagaggcatctgtctcttcccccgcatgcatctttctccccgtctggcatggtgtttctagtcttttgtggatggggacataaacaagccgccatcaactgcttggtgacattggccaatcctgtggtggccccagctgggcttgctgcctgtgtgtggtgagggtgcccttcttgtcacccgttgtcatttacgagacagccctgtgtcacctgttgattcagagggagctctcctcatcacctgttgtcatttatgagccccgtgtcacctgttgttgcttcacagggagcactccttgtcacctattgtcatttatgagccccgtgtcacctgttgttgcttcacagggagcactccttgtcacccattgtcatttatgagccctgtgtcacttgttgcttcagagggagcgctccttgtcacccgttgtcaggtgtactcactttgcttctcccttcctgcttttggggacgatcacaggacagtggcttcagaggggaagtacctcgacctggctgaggtcatgcccagagcctgactgctctctccacccacccatgatcccatcagcttcttccccctccttctccatctgatctgagcatttaccatttccttccatttaagcttcatttgagttgcatcatgatgttctccttttttcaaagttccatctgcccacaggtttccattttctctagaaccctcctccttcctctctagcccctggcccgcccctctgcggttctcaggaagcccctcggtgccccctgccccttatctagaacagcttctgcctagggtgggcaaggcagggtgggaggtggggggtagccgtgcagggaaggggtgaagcgggcccctgtactccctagctgggctgcaggcttggaggaaaataagagtcagacgcttgttaaaacagtgaggacagctttattcgaggaaaatgcagtcggggttgaccttatcagcaggggagagatcagcccaactcctaatacagcaaggaagggacagagctgggaagtggagtgggctgggtgagtggaaagtagctgcgagaagacatcacaggtagggggattcttgccaaaggcagggggggactttgatgtcaaaggtggggatgaggactgattggatctcaagggtggtcagatgtgaagggcgtgagaggctcactaaactgactaagcaggattcttgctgagactgggccaggcaggctgaagacaggaggcagaaagagggctcagaggagcctgagtgaagtttgatcttggggtgaggggtgcaggggggaggggcagggtgggtctttgttggggctctgtgggagatttcagggctcactggatgtgtggggcacagtgggccctgcctgagccccatgacgcctggacgctgccaccaggggcctgacctgctgacgatctctgcactgggtctttaatcagcctcttgggcattgtaaatgctagacaaagattcttctctttttaaagtttactaatttccctacgataaaactaatgcattttcacaggagagactcgggaaattaccaaggagcgtgaatcaggtggtcacagtgaattgtggatgtttgtgtctgtcttggggaactggtgtaacgtttctccatctgacccctgctgtctgttggaggtcaaggagccagcctggcctcacaacttcctcctttcagcaaagtcaggaggccattccctccagggatgggtgggctgcagcctcttggcacctctcgggatcctgctggcagatgtatcaccgtagcccaagccagcctaagccagcctcctgtggcccagcaccttctcttcccacgtgggcagctgtgttcccaggcaaaccttcctggaattgctctgtgctctcagagctggtgtgctttggtgttcagctgtggccattttggctttgagtttgatttgatttttgaagaaagtttttatttctttacccaaatattctatgtctcttcggtaagactggaaaacacagaaaaacagagaaaaaaattcccccataactaccctgcccacctccatataacttttattagcattctgagctatacccctccagactcatttctgcctctccagaagtgtgcataaagtctagaaacataggtgaagagacctaatgccatcaagaacatcaacctgtaaaggaataaaataatgtcatctgtgtccagattttacagatgctttgtagatatgtgtaacagaaatgtgggtatgttttagcaaaaataagaccatatttttgttttattttgattgattgtactataaattccagtagagcattacagagccagcccaagcccatctctcctcttctctactcttttctttccccagtgaccaatagccactctgcggagggaagtagggatcatatttgtgcgcgttttacgctcttgctacacatgtgcgtaaccttaaacaaaacattagtttttatgtgttagaaatactcataaatggtggcccaggcatggtggctcacgcctgtaatcccagctctttgggaggctgaggcaggaggaggcttgaggcctggaattcaagaccagcctgggcaacatagcaagaccctgttttgttttgtttttttttttaaacaaacaaaaaaaccaacaacagttaggtgggtgcagcatcatgtacctgtagtcccagctcttcaggaggctgaggtgggaggctctcctgagcccaggagtttggggtgatagtgagctgtggtcacaccactgtactccagcctggatgacggagtggagtgagaccttgtctttaaaaaaaaagaaaagaaaacagaaagaaatactcataaatggtatatatatatatcactttgtaatttgttcttgactactttgtcaacaatttttaagctgtatccatgttgatacatagatgtggttcatggtcttcttttttctcctttttgttaactgctgtatacaattccattgacttttttttgaggcagggtctcgctctgttacccaggctggagtgcagtggcacgatctcggctcattgcaacttccacctcccaggctcaagcaatcttcccacctcagcctcccaagtagctaggactacaggtacatgcctggctaatttttgtattttttatagagtcagggttttgccaagttgcccagcctggtcttgaactcctgagcgcaagtgagccacctgccttggcctcccaaattgctgggattacaggcgtgagccactgtgccagcccccattgtctaaataagccatcgtttctctagtcatatacagttaggtcacttccattttttcattagtataaagagtgccatatgaatattgatcctccttgagtgctgtggaaggaagcctctaagatgccgccactggtccccacatcctggtcttcacacccttgtgtaatcccttccctcgggtgttggctggacttaaccgacttgattctaacaaatagaacacagcaggaggaatgggacatcacttctgacatcaggttataaaaagactgcagctgccagcttgggtgttctctgttgccctcttggattgccagccctggagggagccagatgccatgtctcaaggcagtcctgtggagaggcaggcctaggtgacaagggaccaaggcctgccaacagccatgtgagtgagcttggaagcagatctccatccgctccccactcccagctgagccttcggatgagactgctgccctgaaaacagcaaaggggaacctcatgagagaccttgagccagattcccagcccagagaaattgtgagataatgtttgttgttttcggctgctgacttttggagggtcatttgttacacggtaacagataaccaatacgagcacaccctgagaattccttagaggtctagaatatttagcagtggaattgccaggtgctatggtattctcacgctcaacagtactgtttattactaaattcatctccaaggcatttgtggcagtttcactcccctctacaagggtcagtgagctccttttcctcatacctctccggcacttgtgttgtcagactttaacatctgaacactctgatgggtgtaaaatagtatctcatgattatttgaatttgtacttccctaagttctagtgaagttggacatattttcgatacattattgtcctttctgctttcctctgctgtaaattaattgcatgttcgtatcctctgctgtaaattaattgcatgttcatatcctctgctgtaaattaattgcatgttcgtatcctctggtgtaaattaattgcatgttcatatcctctgctgtaaattaattgcatgtgcgtatcctctgctgtaaattaattgcatgtgcgtatcttctgctgtaaattaattgcatgttcgtatcctctgctgtaaattaattgcatgttcgtatcctctgctgtaaattaattgcatgtgcgtatcctctgctgtaaattaattgcatgtgcgtatcctctgctgtaaattaattgcatgttcatatcctttgtccagtctccttttgggtggattatctttttcttagtgatttgtagattttctttttttcactctagagactaatcctttgtcagttcatgctattttatactctgcttttttcagttagcagcgtattgagaatgttcttctatgccaatgtatacatcattttattgacattccattgtggagatgggtcatttatttatttaggtggacgtgtaggttgtttgcacttttgcattagtaggaacatgactgtgtgtcggtcagctgggctatgctctggtactaatgaccctccaaatcttagtggtttgcagcaatgaagaattctttgtccctcaagtgacatgaccatcacctgttggttgtggctctgctctatgacgttgtccctcagggagccaggctttcagagcagccccatctgagacattgctggtctcatggcagagggaaaaaagatggtggaacaacataattctatttctgtttttcctctttagagacaggatattgctgtggcacccaggctgcagtgctctggtgctatcatagctcactgcagccccggaatcatgggcacaagtggtcctcctgcctcagcttcccaagtagctgagactataggtatgcaccaccacacctgggtaatttttactttttatatttttcgtagagatgggggccttgttatgttgcccaggctggtcttgaactcctggcctcaagtgttcttcccaccgcagcctcccaaagtgctgggattacaggtgtgagccactggacccggcaggaacaatatacctcttaaagcttctgctcagacgtgggaatggctatgtggtgcgtgtcagttcccctcacattgcattggctgaagcaaaccctggggcccaaccagtgttggcggggttagaagtagacccctcccatagggaggccagggagggaggattttgagccaagaccactcaccacgtgctgtgatgagcagttgcctccccctcctttcgtgtcttcgtgcctcctcacgtattcttacaagtagaattgctacattaggaatatgcatatttgtaaagtatttactatttattatgtcagctaggttttaactgtcactgcatttgctgtgaattataggtaattattcatcctgatgaccatttaaaaaagaagaacaatattattaggtagaaatagtccctggctccccggttgcccaccgtgactataacagcatatctagcttggtagttttcaaattatttccacgttttatttacttctcacagcctccctgtggggttgcaggtgcttctccactcctccactgacaaggtgcctgaggctcagagaggctgagaaatgtgctctgggctgcacagctggggatgaggcgtagaccctggccctgctctgttctgggctctttctcctccactctggcctttggaggctgtggctaagatcttcccccagccccttccttcccaccttcccttcctgctcttgtgccccgtttttcacagtcctcagtggctggtttctcagtcccccaggaggtgcaggctggttcttaggaatggtctctgtcaatgttcccggcagtacctccgagcctgccctctgaggatgggtcggccatggctgcgccggcttagtctgtatttaggtatcactgactatcactggacttggggaggggatttactatttttagagaaagtcaggggagctccataaatcctgttagtcaacagaactgcagagaggtggctgtttatgaaggagagtgacttttttagaagtggcgcatttagaagaccacatattctatcattctgtgtacatgagcggtgcagaataggcaattctaaagagacagaaaatagattcgtgattgcagggagtggggaggagggatgggaagcgactcctaaggggcacggggtttcttctgggggtaatgaaaagcgttctggaattagatagtggtggtggctgtaggacctggtgaataataaactgaaaatcactgaatcgtaccccttaaaaacacacaaagcaaattgacaaattattgggaggcaacataagagaatggggtgtgaactttggatcagtgcggcctggatatcagctgtgtggtgttcaaatagattgcataacctcgttgagtctcagtcttcccatctgtgaagtagggatcattcctacttcgtagggttggcatgagactccgtgagatgaagttggtgggtcacttggctggggcaggtgtcacggagcgggacctgtgattgttcagccacctactctgtgcccagtgctgtgttggtgaccaggtatgtatgaagtcagtaagccacagtcctgagttatggtgcagaccccacatgcacccagagtcagcttggcaagaccccttgacaccacgtgcgtggagggtgcaggtcggagagctcacctccatggattccgtagagctttgaggcgtatccacaaagtgtccaggagaggtggcgtcgcctccacttgatagaggaaaaagcagagatggaggcagccagaagcatggtgcagtggtggggtttggtcattaatttgataatcacatggaatacaagctaatgtttattgagtacttactgcctgcctgctactgtaactaagtgctttactcctgttatctcatttaattctcaaagcagccctgtggcactgaggtggctggagatggagggatgtgtggctgccatgtgtttgccaggaagcagcaggatgggagtgagggcacagacagacacacatgccaggacttgtttgcacgaagctgaggaatgggtgcccatcattcattatactcatctctctgttttatgtatatttgaaaaaaaaattttttttgagatagggtctcgctgtgtcacccagactggagggcagtggcatgatctcggctcactgcaacctccacctcccgggttcaagtgattctcctgcctcagcctctggagtagctgggattacaggtgggcgccaccatgcccacctaatttttttttttttttgagacctgtcacccaggctggagtgcagtggtgcgatctcggctcactgcaacctccgcctcccgggtttaagcaattctctgcctcagcctccccagtagctgggattacaggcacatgccaccatgcccggctaatttttgtatttttagtagagacgggatttcatgcctgattaatttttttgtatttttagtagagacagagtttcactatgttggccaggctggtcttcaactcctgacctcaagtcatctgcctgccttggcctcccaaagtgttgggattacaggcgtgagccaccgcgcccagccatatttgaactcttttacagtaaaaagtttaaaaaacaacaatcctatgaggtaggtcctcttatttgtgctttacagatggggaaattgaggctcagagcatgtaagattacacagcaagattcggagatagctcgccatgttcatgcccggcaggacgtagcaacagggctggcgaaacggaggccccaggcttgtgggcctcctggggttcctgtgcgttgaggcctgagcccctgcgtgcgcccagcggagccagcactctccctgtggtcctactgggcatcacaggtgtgtatgtgaggggtatggggaggggattcttggttagtctgggcttcatgacattgggatgagttctttcacttggttttgttgatctggtaaaatctgtggtcctgtgatatcaccttgcttctcatagtatgagccttcaacatttggcctcagtggtggggtgtgcctgcaccgccttcccccatccctgcctcggctcctccccacaacaaagcggaaggaagacatagacccaagggtgcacttcagcccctcaaccagctgtgtggctttggagaagcggcttaacatctctgatcccagttacctttcttgaacgggaaagatatcaatgcttccttcactgattactggagcttcttggtgtgcagtgtctaggctgctttctaaccatgtaaggtgtagccacagtattgtaggacctgttgctaagaactgtgccactatcttgataaacatgttttccagggactggtggtggaatgttctagttattaatgtgcctttaacgttggatgactcagaatatccctcagatagtaggaataggtagctttgagaggtcatctgtaggagggcgcaggaacatcccaggagggggtgtcatacctgttggcaccatggggatgcaggctcagaggggactgaactttccagggccacgcagtctgtaagcggcagagctgggacgcaaccccaagcttgctgctctcaaagctttgctttcaaactctcacttcagacatcagggcttcctttcagactgagtcttatccctaagcactgttggagaagaaagtctccaggctgcagggccccgcagttcccccatatccctgcccttccagccagcccacgcctggggcctgtcctcccctgttcctgaatccctgtcctgttactgccctccgggtaagacagcactcttataatcatgcttcatgccgagttcatgaaattaactctcaaactcctcttctctgggttaaattatttcacttttttcccttcctcatagaatatcattataaattctagatactatattggatatgtaataaaatcagaataaattacatgtgatggccactgaactaacctcccttcatgtgtctggaggcaggttttctgtggagttatgctttaaattggctgtccttcgcgatttttcttaaagcctaggttgactactcaagggtctagatttatgatagaaactgtgggctggggtgcagtgctggggtgctggggtgcctgtaatcctagcactttgggaggctgaggtgggcggatcatttgagcccaggagtacaaaaccatcctgggcaacacggtgaaaccccatctctacaaaaaaatacaaaaattagccagacacggtggtgcatgcctgtactcgggagactgaagcgggaggatcacctgagcccaagaagtcgaggctgcagtgagtcatgattgcgccactgcactccagcctgggcaacagagcaagaccttatcttaaaagcaacaacaacaacaacaaattgtggcacaaatgtatgcatggaggtactgagggccttctttatagtaggctcaggaatgaccaatgggtgggggctttgggggaagagacgggggtctttaagcagaaactctcccctcaacacaagaaagctgctgaaggacttcagaaacctaaacacgagccgtgggcctttctaaagtggggagggattccctcctgcctaggttatgttgcaaggctgcccgagagagggtggaagggggcaggagagtgggcattggctgggtccaacgcttcccaagagatgtgactgtcttaaaagcaataccttcctgattaccacgggaaaaattcaaatgttttgaaaagatctacaagtttggggttgaagaagtcctttatttcaaagtttctctgggctgggcgtgctggctcacacgtgtaatcccagcactttaggaggctaaagtgggaggatcacttgaggattgctttgaggccagcctgggcaacatagtgagactctgtctctagataaagttttttttttttttttaaattagccagatgtggtggtggtgtgctcctgtagtcccagctacttgggaggctaagttggaaggatgacttgagcccaggaggttgaggctacagtgagctctgattgtgccgctgtgctccagcctggtgacagagtggaccttgtctgtaaaaataataataataataataaagctttgctccccgtttcatttagatggagcgtttgtgggatttaagacagatttttccttgctgagtggttatcattaacctgttgaataagcaacaggccgaggtggggaccctgcctcgcccgcctccaggggcacactgcattctttgtggaagtgtccctggaatgccacagccctgcttctgtgcgaggccagtcagtctgggtcctgggatatagccacatgtgcagtccgtgcctccagcgcgcagcctgaaagggaggcgtgcagaaacaacgtagctccaaggaggactgatcagcccagcctgggggagggtgggaggggactcccagggagcggggcttgtgctggactttgcaggatgccagacttttggcaggggaggaaattgaggtgaaagcattccaggcctagggaacagcatgtgcagaggtgctggctggaggaaccccgtgtgtttgcactgtgctctgagctccctctcatgactctcattctttctcgttgagttttgttttgtcacccagccggactcctgggcaaagagaggcacaatctgttcccggttgggccagctgccctccagtagctacgcaggatgctctggccggcctctgaggattctcttcttctgtccatctcatggctgaagaccaaggctatggcctgtgggtggcagttggtacctctccccgctgccttcccccggcccctttttggacaggatgttgctccctggggcctggctttggagatggccagtgctggtttgaagcttctgtcttctgtgtgggatatcagtgccctgccagctgttgcaagttttaaactcaatgtgcctctggatgtgtgtgtagagtaggggtccttccccagctccaggccctgtgtgtttccaagtgggcccgcagctctgatgtgcagtgggtatgcactggcaagccgtgcactgtcacaatattaaaataacttccatggtagttggtaaatagccccatcacccctctcctgggaccctggacctctagcacaccatggaggcctgccccgtccccataaaacacaccacattcaaattacttatctcctcttcccctgccactctgctgagaaggctgatctcaatcctcggagtaatgactctcttctaggagcaagatgatgctaattctcactagcatgtgaaggactgatagcaccatatctccctccaggactcccgggtgggaggtgggtgtttgcataggcaggcaggtgagccagcctagtttgtccacagacttccatgcaagtgattcctgctgttccctgggtcttcctttcttttgcttctgaacttggaggtttcttgaagtctggaggatttttagggtgggcatggctttaggtgggacctccactatatgggtttgcaagctgccactgctttgactgcagacactggattgaccgtggccaatgccaagtccaagagatcaggctgaaaccaggctaaattttaagagcagaaacaaaactcatccttgcgaagggacttttagatcagtggcagatggcatagaaagtctttctgctgttctcttgtgctgggcgtggctcagggctgaggggagagaggagagatgagggcagaaagagaagagggggcaggcctcagggatgaacacatggcccatggctgtgcgcttcccaagcaagcagttctggagtgaggctcgggcctccatgcctcctgggaggctgcacctcttgggatatagagaacgctggcttcagacccggcaggagtaccggcggctgtgtggtgcatcctgcacagagctgttgctttctaactgggttactgagctgtcgaaggagcagggatgaagactcccttattaaaaactaaacaaaacacaacacgaaaaagccagaacaaaacaagcagacggttgaggactgcagtgaactcattaaccctacagctttgatctcgaagtctcggccgctcctggctcagaggaccctggggacgtggtctttgatgcttgctttccccataggcatcacttcgaccagcgtctgtgtggggtgtgcagcagccctgagccaaggattaattacgtaacaagcccagatcccatccctgcctgagcaggccatgtgccagcaaggggggccccgaagtgccgctaggtgcctcacgattagcataaggcccgtttatccaggaagccagaaccagtgcacatctgttaagcgcatgcaccaagcggcgattccatagttgtatagtgattgtctttatggaactccagaatagcttcttagatatcactcttcaggccctgaaatggagccctgtgcaaagaaatgaagaaaagctatcggggcatctgcagccactattataccatctggcagctcagaaatattttataatcaaatgagtaagacgggcgtcccacactccacagtactctgctcccccttcccttcctcccaggacttgctctgtctctgtctctttctctgtgtctgtctgtctgtctctatgtgtctgtttctctctccctctttctgtgtgtgtctctctctgtgcctgactttctgtctctttctgcttctctctctgtgtctgtctctgtctctctctttctgtgtgtgtctctctctgtgcctttcagtctctttctgcctctctctatgtgtccgtttctctttctctctgtgtgtctctctctctgtgcctttcagtctctttctgcctctctctatgtgtccatctctctctctttttctgtgtgtctctctctctgtgcctttcagtctctttctgcctctctctatgtgtctgtttctctctctctctctttctgtctctctctgtgcctgtcttgcagtctctttctgcctctctctgtgtgtctgtctctgtctctgtatgtgtctgtctctgtttctgtctgtcttgctctctctgtttcaatctctctatctctgtgcctgcctgtctgtctgtctctttctttctgtctctctgtgtgtgtctctctctccgtctttgggacagactagaggaacctttttcccaggagtgataatactgtactctgcgtttttgccacttgctagctgggtgaccttgggcggctttcaagttcccttatcctgggtttcttcatttgtaaaatggaagcactacttcacagtgctgttgtgtgggtcaagatgagatgaatgtgacctactgtggtactatttattatttgtcctagaaaaactttttttttttttttgagacagggtcttgctgtcacccaggctggagtggtggcacaatcttggcctactgcaaccttgacttcccaggcccaagcgattctcccacctcagcctcccaagaagctgggactacaggtgtgagccaccacacccagctaatttttgtattttttgtagagacagggtcttgctatgctgcctgggctggtctcgaactcttgggcttaagcgatcctctcacttcagcctcccaaagtgctaggattataggcataagccactgcacccatccagaaaaacttttaaaaattttgtgttttaactttttctgaatataaaagtgatacatgcatgttcactgtaaaatagaaaatataaagaaactagaaaactatttatgacgcccctcccccaccacaaaaggggcaaggactgcgaacttttgccgtattttggaagatttcctaagtcacacaagcacacagatggtctgttgatccaaaccaggaagaacaattgtgggaataagtggaagtgtgagtgtgtgggtgtgtctgagtgtgtgccctgggggtgtgtgtgtctgtgtatgtgtgagagagccaggctgtgtgtgtgtgtgtatgcatgcaaacacttatgtgcaatgccttggggtcctcagaccccccttggtccatcaggggctggtggcctcccagtaggacactagcacagctgcactcacgtccttctttgagggggggtgacggggagaaagttggggagcagcagtgactgctgatgttgtgggggccatggggagcctcctggtattctgtctcgaggctctggggatatggtgggagaagccctcatgccagaattgggaggggatggaatgggactgaccccatcacagcccacgtgcctcattcagggcttggctgtggagtcttgggggaggtgctccctcatcctcaaatgttaactttgtctgcctggccccagtcccctctgtggcttttttcctctttcaattgggaggcagttctgtcttaaagagatgtttaaccctctaggtctccgtgcaggcatttttgttgtgagccagtcaggctataaatggtccattaaaagcactgtccagttgacataaccggtctaccaggctgagacccacagacccgggactggcatttatttatggatatgatgtgcaaggagagtgttttccagtagcaggcgttggcatcatcaaacagaatgaagtgtactgtgttttcaccatgatagtacaaaaacgagactgtgagagcttctcacttctctccccttcctccccttccttctccatgtctttgtgctcctccactgctccctccccagcacagacaggccctggctccctccccccaccctcttccttctctctccttctaactggggtcaggaccaccctggaggatgttagattttaaacatttgttcctcttgtcatccccaccaccccacccacccacccagattagtttctaagggatttatatttgtttgcagagtggtgcgaactgttttcatcctcagaggagcagagtgctcatagatgagtttgacattactgggattcactttcagaagtctctagagagccccgcaccgcccccgccccccgcaggtgctggagttcagcctgacacacaggccggcctcagtgagagggagtgtctgcctccctggcatccgtgacccatacggtgggcgcctgttctttagaacaacttgctccttccgtcgttggcttggtcacccagcccccggcccacccttttctgagcctgtcatccacaccaggcagagccctgtctcagagtctcatggggagcagggccttcagggaaggcccatgtgctgggactgacttggctcacaggaatttcctgatggtataaaatgtgccccccagcgcctgataatggtcacttcgcctaagttccagccccagatgtggaccacggtggggcaaaggtgggcgtggggaggaggaaagaggtttaaaatggccacacccactacttctcctttggaagtgcctcctgccaccctggggtcccaggagctgatctgtgggtgtctgtcctcagcacccaccctgcttttccttcaggccccgctctggctgtctgggcctttctggtgctgttcctcacaggtttaaacactccagcagcagcctttcccatggcactgtgtctgcggggcggggttgggcattttctgaggcttcctgtgtttcacggggatccagtatgaagcctggcacggagtatgggccaaatcggtttaatgtttagctccccaaacccttcacttctgtgtcctcattaattcagacaaggttgggtttagcaaactgtgtctcaaacataagaaaatgcagcgtgggaatgggggaggggaggagtgctgtagaaggaccatttcagaagccctggtttacaggagaaagattggtatcttcataagtcactcttaagcttgcatttgttcatgctttaacacagtgattagatacctactgtaagcctagcatggtggggatataaaagcaagatcaagttcaagggggcagggatttagggtcagtgagacggacctcttaatcacttattttgtacacatcagagcagtgacattgtgtttctttaaaaatactaggggccagcccgggcacagtggctcatgcctgtaatcccagcactttgggaggccaaggtgggcagttcacctaagatcaggagttcaagaccagcctgccaacatggtgaaacctcatctctactaaaaatacaaaaattagctgggcatggtggtacacacctgtaatcccagctactcgggaggctgaggcaggagaatcacttgaactcaagaggcggaggttgcagtgagccgagatcgctccactgcactccagcctgcacgacagagcaagactccatctcaaaaaacaaaaaacaacaacagaaaaaactctgggccagctgtggtggttcacacctgtaatcccagtgctttgggagaccaaggtggggggatcgcttgagcccaggagtatttgcccagcctgggtagcatagcaagatcctgtctctacaaaaaaaaaaaaatatatatatatataaattagccaggcagggtgatgtgcatctacagtcccagctacttgggaggctgaggtgggaagatcacttgagcccaggagtctgaggctgcaatgggctctgatcccaccactgcactccagcctgagcgacagagtgagactctgtctcaagaaacaaaacaaaactctggattctggccttctcctgggaaatccagatttgtctggtatgatgttcgttgaacccatttagtccagcagcctggctttccaaaagtatgtctgcctctcacggtgcccagtagctttaaccaaagagctcaggaaagggcctgtctgaattcaatcacattcagcatctatttcagcgttttactagctttcaattaaagtagccacgcatttgagcctgatggtcttattgttttatgttgttccttttgcacatttcctgcttgtttatctttgtggcacaggggcatgttcttggctgcagttaacaatgctggccacggcagtgcagcgtttccaaatttcttccctttattaacaggcggtaatggaatctgaatcttcaaaaataaattttacatacttgttctctaccataaaagtcatccatacttattagaacgtctcaaacatactaagaggtaagaaggagacaaaaaataatattttgtcacccctgcccaggtagccactcttctatttgagtgcttgtaagaagcctgcttttccagtattatctgacctggcagggagttgggtaattgaaaaagattattaaagaggggatcataaaaatgatatagacgccgggcacggtggctcacacctgtaatcgcagcactttgggaggctgaggcgggtggatcatgaggtcaggagagaccatcctggctaacacggtgaaaccctgtctctactaaatatacaaaaaattagctgggcgtggtggcgggcacctgtagtcccagctactcaggaggctgaggcaggagaatggcgtgaacctgggaggcggagcttgcagtgatccgagatcatgccactgcactccagcctgggtgacagagcaagactctgtctcaaaaaaaaaaaaaaaaaaaaaaaaaaaaaaaaaaaaggatatagacatattgagcatttcgttttgacataaaacgtttcattttcatataaaaatgcatttattccccatctcttgatacagggccaagacctctcttggattatgggtccactggcttctgtcctgatatgtcttttttgcactatccacactgttaatgcattttctgagattctcagtttctgtttctgtcaagtaatgtaggaactagcaccaaatccttgccgatttcatataccactgatattatacagttattttgttcatgcctaattgaacagccatcttcccccaaacattcaactctgtttcataaaaccaactccttttaattcctcttctgagggtttgcataaaatttaattaactttggtaattacataagtactactggtataagcaggtttggaaacaaacgtaactgagtcttggtgggctcagagtgcacctgcccgaaggttcccacatgctctatgcacccagaaggggacagagcatgccccatagtccaggggcaattaggggaagcagctaatgaagtctgctttcttctggccttttaaaaatctatgtccttttttttttttttttttgaggcagggtcttgctctgttgcccaggctggagtgcagtggcatgatcatggcttactgcttcttgggctcaagcaatccccccacctcagcctcctgagtaggtgggactattaggtgcatgccaccatgcctggctaatttttgtattttttgtagagacaggatctcaccatattgccttggctggtctcgaactcctgggctcaagcgatccatctgcctcagcctcccaagtgctagtaagccaccacacccagccaaaatttaaaacacctgtgcctcaaagaataccgtcaagaaagtgaagagacagctcacagaataggagaaaatatttgcgaattgtatagattctagacttgcatctagaatatataaagaactcttacaactcaataatacaagacaacccagttaaaaaatgggcaagggacttgaatagacgtttctccaaagatatacaagtggccaagaagcacatgacaagatgctcaacatcattagtcacgagggaaatgcacatgaaaacaacagcgatatatccagtaagactgctagaatcaaaaagtcctataaactccagcggagatgaggaaatggagaaggtggaaccctcatacgctgttggtaggatgaaaatggtgcagcctcttcagaaaacagcctggcagttcctcaaaagcttaaatctagagttaccatatgacctagcagttgtactcctaggcatataagaatgaaagagaaatgaaaacttacacataaatgtttacagcagcattattcacagcagccagaaagtgaaaatgaccaaaatgtccatcaactgatgaatggataaacaaaatgtagtctatccatacaatggaatatcactgagcagtaaaaggaatgaagttgagattcatgctacaacatggaccaaccttgaaaagatatgctaagtgaatgaagccagtcacaaaagaccacatataatacgattccatctatgtgaaatgtccagaataggcaaatctgtagagacagaaagcagattagttgttgcctggggctgggactgggaggctgaggggaaatggggagtggcagtgaatgggtacatggtttcttttggggaagataaaaatgttctggtcaggtgccatggctcatgccaataatcattgcactttgggaggctgagtcaggaggactgcttgagctcaggagttccagatcagcctgggcaacatggcgagacctctgtctctactaaaaagaaaaaaattagccaggtgtggtggtgtgtgcctgtggtcccagctacttgggaggctgaggtgggaagattgtttgagcccaggaggttgaggttgcagtgagccatgatcgtgccactgcactccagcctgggtgacagagcaacaccctgtctcaaatataaaacaaacaaacaaataaagggcaaaattctccctgtctgaaaaagggggcagtgattctttacaaaattgatcatggtgataagcgatggttgcacagttgtgtcaccattgagttccttccttccttccttctttctttctttctttttttttttttgacggagtctcactcttgcccaggctggagtgcagtggcgcgatctcagctcactgcaacctccacctcctgggttcaagagattctcatgcctcaacctcccaagtagctgggattacaggtgcgtaccaccacacctggctaatttttgtatttttagtagagaaggagttttgccttattggccaggctggtcgcaaactcctgacctcaagtgatccatctgcctcagtctcccaaagtgctgggattacacagccaaccattgaatttaaatatgtgaattgtatggtgtgtgaaccgcaagtgttctgcctatccatatacctcccactcaccttccctctccccatctcactgttctggtgagggaggttcttgctttcctttcgcctgtttgggacctcacttcctttttcccttccccatccctttgtagccccttctcaagagagagaagacaccttgattcccacctacgctctgctaaaacttttccgttctagtcttaaatctctctctcttaagaactgatttcccagtagggtttatgtttggagctaaattagtcctcctggaagcagttgacttcatcctccagcagctgtgccatcagcagaggccatgcatgctggggcaagatccaggcctatctcttcctctgcagtcccctggggacgtctgggatctggttccttggttgggccacgcttagctctccttcgcatgggtgtctcaatgccagggtgtcaggagagctacagtagccagctcaggcccccccagggagagctggggagggagctgagggcctggtgccccccatcaggagggacctttggagtctttcttggctctgcccaggccttctgagcacacagagatcactccagccctctgccctctctgtagccaaatgaaaagactcttctagtctttctggccaactagtaagctctttgaaggtgggtaccattcttgacattagaaaaaactcagagccgtttggatactgaatatttttgacatgctctggtcactgaacgagaagactcttcatgaaaatgatgctttgtcagctctgtagagaaaggcgattggaattttggttgaccaggttagggtaagggaagaatgaatccccagtgtcctaagctggcaggcagtcgtgccgatgcagttctcatttctgctgtcaatttgccaggagactcagaaaaaggccgctatgcctttctgcacctcagtttcctcatctgtcaaatgggcagtgttttgggcgtgctgggcacaggtttgtctgagaaccagctgaggcctgtgttgcgcatgggacctactattattctttataatattaataccaaggacatttaacacctgcaacaacaagaacaagcacagtctcagaaggaaagcccgtcctctaaaagagtgtctgtagagcagagaagcccccagtgccatccttctctttctgccaagctcctgtgccagtgctgtcgtggggggccctgcctgcaggtgtggggatactggttcagggccagtggcccctggcaactggtttgtcttttagagaaggcaggactgaaatgatcagctttccatgtagggccagactctgggcaggtttctttttaaattttttaaatttttttgagacaggatcttgctctctcacccaggctggagtgcagtgacatgatcagggctcactgcagccttgacttcccaggctcaagcaatcctcctgcctcagcctccccaggtagctgggattataggcgtgtgccgctatgcccggctaatttttttgagttttagtagacgaggtctcactatgttgcccagattggtcttgaactcttggacaatcttcccacctcagcctcccaaagttctgggattacaggcgtgagccaccacacctggtctcaaataaaattttattggaacagctacactcatttgctttatgtcattgtgtccggctgccctcatgcagcaggcagagatctgctgacccctggtctagaatgtggaatgctggatccctgggttgagggactattttaatggtaagtacccatatttagatcttttttactgtggttttgtgatgtgatctgtcatctcctctgggcttgcatttctccagtgacaaggcgctcactcctcccacggcgatgcattccagccgtcgaattatgtagttctactgcttaatccttccttaacttgctcttcctgaagcctcaactcactcatcttctttctcaacccctcaggcccagcagaagtcctctctgtcttctccaggcgcagcccttcagccatgcaatcctgcgtgtcctcgttcttcattccacaaatacgttctaagggcctcctgcatttcaggcacttcagaggaccttctggaagcttcccagggcctgctatcttccctgtactgtaaggggacactttgctcaactgttcacttgaacagagtcttcaatgtcttctagtgaattctgggctgaaaccaatgtcgacttggccaaattaaggccacggtcttggtcagccaccttccaggttgacttgccagggtgtcctgggttggtttgttttacagaagcagagctcccagggctcatcgcacagccatggccgaggtgtcgggactcaaattccgggcccttggctgtgcttctcacattctttccattgtccgacgcactgaggcagagacaggaattttaactactcaaaaactactgtttacgtattttactttgacttctttctgggttcttgcataggcttcaaggagggaggatatggatgtgagcttattgtacaaatgccctgggttttccaaacgtgtctgatcttaaatacacagccctgcgtgctgaccttgtgttagaacttaatgatgcgacgtttgctttgcaaactgtggtcccctcctcatagatccttcaattcaacaattgaattcaacaagcccctgggcacccaccgtgcaccaggcactgtgttaggtgctgcagagatgaagatgaggaggatgatggcctgtgcccaggcaggtaacagactagcagaaggacaggaagcaaagtgggcatgtgtaccatgtgtttaaagcctgagggaacagctggtaggatcctcctggggctaggtggtggcagcagcaaagagaggggacatttgaattgggctttgaagggtgcataagagtttaacggggccgggcgcggtggctcacgcctgtaatcccagcactttgggaggccgaggcgggcggatcacgaggtcaggagatcgagaccatcctggctaaaacggggaaaccccgtctctactaaaaatacaaaaaattagccgggcgtagtggcgggcgcctgtagtcccagctacttgggaggctgaggcaggagaatggcgtgaacccgggaggcggagcttgcagtgagccgagatcccgccactgcactccagcctgggcgacagagcgagactccgtctcaaaaaaaaaaaaaaaaaaaaaaaaaaaaaaaagagtttaacgggacagccacaccactgatcactcagaagtaggtgggttgtgaatcttcagcattctggaaaatgtaaaaagttgttcagtgggcagcagtaaagagggtttcgttttcctggagacactgttgctactttgctggcttatacagggacacccagagagcggctgggaaaatcaagaactgtgtcacctcctccgttcttgcccactgtccagggctcaaggagattggggagcagtttgcaaaggcatttgaagattaggctccacagagatggacactttttttttttcctaaatagatacagagtagccttgtgaaggtttcttttgggtctgagtaggggacgcacagggcatggctatgagggtctcagaaactggtacctactttcctcttatttggcaccgggagcccctgccggaggacatgttctagtgacagccctgggctcaggcttggagagtgcattctcttccccaggaacgctagtcacagctcagtaattcaccccagggaccgcacagagcaggtgggatggtattgatttgtgggccttttggcaaaacatactcattcctaactggcgagggaaccgccagttcatttattcatttactcttctgagtccagcaacaaccttaagaggcaggtgttacctctggtttctgtttaaactgatggccagcaaggtagggcaatttgcctaaggacacgcagctcctaagctactaaacctcccgctcgcctggaagagaagacaggacgggcctatagtgaatcatgagtgcagcatgagagtgttaaaggtcacaggacgcctcttagtgccaagggagttcatagtggagaccccttttgcctgagggactggggaggtggtagttttgaactgggacttgaaggacagactggggtaaaagcaagaggagaagcttgagggaggacggtgtgtgccaggacggtgggactcagagggtggtggggggcacatccactgtccccttccatcctgcagccactccctgaggtggcatttccttgaatgacaggagaggagcctgaggcacgggaagattaagtaaccggtcctacgtataaggtggcatttgaacccaggtctacctggctccatagccaggccccgtgccccacacaccacaccacctggcgcttggccaacaggaaatcacgtcccccagtgtgtaagtcagggaggcagaggtgctgagatgctctcacctgtgggctcccgggcccagccatgctcttggtgttccctcaggccctggcttcccccctccctccaggtggacccatgcttgtgcccctgtgcattctcccacagactcctccctgcggggccacccatctccaaatcccagctgcatatccacaactgtagagtgttttaaaatagtgatggtagcctaggcaacatagcaagaccccattacccccaaaaatacaaaattagctaggcgtggtggcacatgcctgtagtcccagctacttgggaggctgaggtgggaggataccttgagcccaggaggttgaggctgcagtgagctatgattgcaccactgcactccagcctgggtgacacagcgagactctgtgtctaaaaaaaaagatggtgatgctgtccaggcttgacgtaggagccttccgttcctcctcagggcctgtgctctccttttgaggaacagcctccttttagtaaatgtgagggtggctgaggtgggacatgagaggcttgcagtacccaccaagccaggccagccacatggccttctcaactcctggcccagcccaggttgtcagctctctcaggttttgctctttctcctgcgtgctttccccgtgttcttctgcactgttatctttcctcttcatctgaggccatgtctttaccttatgtggtgctgatgtgggccagggaagctgtggcaggggcccgggaaccaccccagggggatgcagagggagtggaccctgtggggctcggccatggcagaattctgctctgattggctttagatcgtcgcctgtgacagcgtttcctccgcggagtgtgttaggaagagcagaaatgcctcctgcatctttattagatccctccaaatggaaatccagcagaaagccgatgttcttgtaaatatcacgacctccctccccatgaggtgtttgtagaacagttatttactcgttttgttttccccacctgcagtttacagaagaaaatcaagaaagcgtgtttttcctccatgcataatcccatccccgactgtaacaacaacaaaaccgtcctcctgttaggaagcagcagtgacttctttaggcaggaaaaaaaaaaaagcgtgctatgccagaaagcaggagcagctgggaagggagagggagggggccacacctggcctacccccagtcaccttttacccagggatcccctgaggaaaacaagctgtgaccttgagccggcaccagccccagggctgaaaccccagccctgtctgaagggttcctttcccgtgtccaccacggccccgtgctgtatagcagccccggtggaaagcctctttctcctgtacctggaggagttgctggaagaaggagaaggctcagcaccagcttctggctaaaatcgtggccgatggctggatgattccggccccactttaataaacaggatagatgtgcggtaacatcaggttgtcaggccctattttgtgatagaaaggatgaggagggaaacaagcacaaatcagtagtgtcacaatctcaaccacttcttccattttcgttaatagaatcggagtctcactatgttgtccagactggtcctgaactcccagctgatacggaagtggggcagggaagtgctgggaggagaagggcgggtccctgtcgagggctccacccctgggcccatgcccacagccctaggtgaggacagacactcctgcctttacacccaaatgctgcatttcccaagaccaccctggcccaccacactcccatcctgtgcctataaaaaccgcgagagcctagcaggcacacacagaagcggctggacattgagaggaacacgtgggtggaagaagacacacgtggctggatatcaagaggacgtcgggggaacatgccctggggaagagcacacaacagatgccggcacgctggcaggccactgaccagcagaatgccccggagtttggctggggcggtcggagaagagtcaggaaaaccatctcccttctggctcccccatctgctgggtgagctcaataaaaccttgcactcattctccaagcccacgtgtgatcttctggtacaccaaggcaggaaccagggatacagaaagtcctctgtccttatgataaggcaggggtataattgagctgactaacacaagctgcctacggatggcaaactaaaagagcaccctgaatgcccaccggggcttcagctgtaaacattcactcctagacactaccatggggttggagccccacagcctgcccgtctgcatgctccccttgaggtttgacccgtctgcatgctcccctcgaggtttgacccgtctgcatgctcccctagaggtttgagcagcgggacactgacgaagcgagccatacccccatcacatgccctttgagggggaaaagggaacctttcccgtttcacagccacagtttcctgctgttttctgaaattcctggtggccactcccttggtgtccatgggtgtctggtgtgtgcctatgtttgctgcgggctggctcggcgagggggaggtgggcagctgggggctctctggaccctgcggctggcatgggttagtggctccgtgtcacctggttcctctcacctctgttttcccttctagcccctgcaggcaggagacttcaacgcagagattaagaagttgagatgtctttgttcccagaggaaagtccctgcaggccccggcctcatggcctctgtgacagcagcaggattagaggcagagttggcccagagggaacatttctcccaccctctgtccctcggggaccccacttcccaggtggcctggaggatgaagtcagggctctggcctcattgagggcctggaactctttagagcccatcaggaccaagctctggtggccttccaggcccactcagtggctggcggtcccacctccaaatgcaggcagaccacactccctgaagggcagtggcaaggccaggccagcacctctccactctgaggaaggggccttacccagatccccgtgtcccccacagcggtggcggttttattgatgtattgtgaaggcacagggagggccctttccagagcaggctgcatctcccctcagcttccacactctgaacctgcctcctgcctccttccacagtgcccgccgggtccacagcgcccgccgggtccacagcgcccgccgggtccacagcgcccaccaggtttgatgtgggctgagcacaccgtcactaactcattccttcattcattcttcactgtgtggggtgtcgggacccagcacgggctcctggcgcagcaggcctcagaccctggggagagctttgctggaggaagtgcagtgccaaggacccatgtcctcattccccctgggtagagcgtgtcgggtgactctgctgcggtctccaggagctggcaagggaggggtgcaccaccagggaagggaattccaggcagcaggcaccaggagcctcatccaagagaaagagaagttccctagactcccaggcagggtgagccgaagggccttggagagtccctgaggtcccgtttcatgggagacttctctcacaaagcgaatgagctcaaatacggaagatggagaaatggaaaacagaaacagaacagaacctccacctgctgggtagatgttaactgaatcttttttttttttgagatggaatcttgctctgtcacccaggctggagtgcagtggcacgatctctgttcactgtaacctctgccttacgggttcaagcgattctcatgcctcagcctccccagtagccaggattccaggcacccgccaccacacctggcaaaatttttgtatttttagtagagacaggatttcaccattctggccaggctggtctgaaactcctgacctcgggtgatccgcccacctgggcctcccaaagtgctggcttgagccaccatgccgcccggccttacctgaatcttatcacacattcctttggaaaatgaatctcctgtgatgggaaaccagccattttcctggtgaggcctcagccctgtagccattccagcatagttaacctgggactctcttctcctctcttgtctctcctcttcctcctatctggcctgcttgctccatcctcccctgctttctgtctctctcctcaccacgtgcctttggatgttctgaatatgcttttgtttgcctgtccagcagtattctctccacggtctcctcctgggtgtctggcgtgtgccttgcgtgtgctgcgggctgggatctgtgggaatgacatagtcggacatggtcctgagcctgttggcctggggactccttttctgtcatactagatgagacaggcgagactgccctggaaagcccggcgtgtctggcctccccagtgctggacggtggccagtgtggttttccaggcgagtccgtgggctcctgggtgggtggtcgggctcgtggggagatcccaagcaatggttgtagagggatgggagggaatgggtggatcccagagagagagagagagagagagcaggctggttccactgtggcctcgttgtctaatgaggagagtgtacagataagtcatgctttgttttgctctgtctctggaattttaatcagttgccctaattgccttcaaattattggaagggaaaaacgccagcagagggtcctgacagatcccagctgtctagctgaggacttatcttctcattgttcttgggaaaccagtcaggtttagggacttgaggtggatgattcattaattcttttaaactgatttcctcagccatgtacacatgtgtgaaagcccttcttatgttatcagtattaccctaatatatcagagggctaggatttctcataaggcgaccgttatcttttgataatcacataaataacgtttccatagttctcgaaagcttgccagatgctttcatgtacattagctaacttcttaaatttttttttttttttttgagatagggtctcactcttgtcaaccaggatggagtgcagtggcatgatctctgctcactgcaacctctgcctcccaggttcaagcaattttcctgcttcggcttcccgagtagctgggattataggcgcccgccaccatgcctgcctaatttttgtatttttaatagagatggtgtttcatcatgttggcctcagactcctgacctcaagtgatccatctgcctcagcctcccaaagtgttgggattacaggcatgagctgccatgtgtggctgacattagctaatttaattcttacaataatcttatgaattgggattctcatctcttttaaaatgaggaaactgaggctcagagaggttaagtcatgtgcccaagatcacttagctagtaagtgatgggcagggctgtggagctggttcacttgactctgctgccattgcatccagtttgctctgccagcgagtcaattgagcatttggagcatttgctgtgtgccagcctcatggaggcaaacggagcttcggaacccaggtgtcgagaatgagctgttggcactcagtcctggagtggcagcatggggggcgggggcaggagcatgggggacaacagtccagggagggccacatgacagcaagcagagcctcgaatgcctgagtcctggctccagagagaggccagcctgagctcctccatgtcctactcctgtggatagaccccccggaatgcagggggccgggctgagcaagaggaggagaggacagggaaggaacatgtctgcttctttccttcaggaaaggaaaggtgagctgggcgatggggaaggcctccacggtgttctgttgtaacgttctgccacttggcagcctcaccagggacatatcagccccaggctgattatctgcagaccgggatcccatttctgctgctttgggagagaagggagggtagccctgaggccatcccaaatgcgagtctgttcacagaggggctctcctggcaccttccccagcccagacgctgaggagggcagccagaagcccctgcatcaggtaggagtgctgagtcatgagattgggttgaatggcggctttagcacagctgtggcctgtgttagagagggtgagtttggaccattcctgagcagagggggacctcagaggacagtcggactggggaatccctggcccagagagggaaactggttttcccagagtcacacagctaggtgcccctttgatggttctctcagtgactcacgcctgtaatctcagcattttgggaggccaaggtgggaggattacttgagcctaggaggttgaggctgcagtgaaccatgatcataccactgcattccagcctggccaacagagcaagaccttgtctcaaaaagtaaataaaaaataaaacccattctcactctaacccatactgtatctgatttttttcctgaggtaggcttgagatgggagggttgttattttttgtaaatgcattaggggcggagtggtgggagagtgattcccctgcagcccttctgaggtcactgccacaccatggcaagaaaagtatttctgactcctggagctccacggtgtgacaggtgggcaggagctgctgggagtgctgggcagaggtttaccgtccagcacccccatttctgctgctctgataacttggatcgactgaagaacctcggggctttcttggctgtttgtaggagcttccagaagcgacctttcgggatgcctcttacatagtcctgcctataccctctacacgtggcgtttcaggtctggagagtcatgtggtgtagctgtatttctgggaagtgtgtgacccgaagcctcctcctgtcagaaccaccggggagctcacaagctaaagtgcagattcctgggtcatcccagacctgctgaagccaaatctttagggtggggccaggaatctgcattttaaacaagctccggaggtggctctgaggccagccacagtttgggcacggcaaggctggggagccaggcttgtttcggatctccagtccttgtgtgggctgcgtgaccttggatgagttatttcccatctctgagccttggttctctggtctgttaagtggcaatcttgccccttctgttttaggcactgtcggggttgcctgccttctggtaagcgtttagtgccctgagccgactcagctggtgctcagggaggcctgatgattcggggcgcttggccgggtggtggggtgggacaccccagagggaagggcactggtcccagcttggtggggcaggccacctggaggaggggtggaccttgggagtgggttatattagggcctccaggcctcagtttgggaggagcttgcagtgaccttggagatggtagtgaccttgtcctcctgccctgcctgggtgcacaggctcccagcacgtgggtggcaaaggtcctagagagcacccagaggcgggtgtctgcctggggtcgagtgtgggagctgggcccagagcccccacttctgcctggcatccgggggtccctccgggaagctgaggttgttttcttgaacagtaaggactggccagagccctgagcaccgagaggtgagggtgaggccccccctactctttcccccaccctcctgggaatgactgccgacatcagggaagggaggggccccaaggccagtgacctggaatgcgatggccagggaggcaggagctggaggctgtgtggggcacgaggaggccgatcgggtgtcccgggggagactcctcgctgcttccctcgggatggtttccatgaacttccctccccggccctgacggcctcctctcctaagctcccgcctcctttttttttttttttggagacagtggctcactctgtcacccaggctggagtgcggtggtgcgatcatggctcactgtagcctcgacctcccccggctcaggtgatcctcccacctcagccttccaagtagctgggactacaggtgcatgcccccacaccagactaatttttgtatattttgtagagatgagttttgccatgttgcccaggctggtcttgaactcctgggctcaaacaatcctcctgcctcggcctcccagagtgctgggtttataggtgtgagtcactgcacctgaccatccctccccgcttttatgtccttttctccctctctgaggtagggggaccaagccctcctccccaagccctgtccactgtggggccttctacaatgtgagcttgtacatctctgtgatgtcacccaggtgccaccaggtgtgtgtgtcctgatgcctttggccaccagcctcaaaatctcccagagttccaggtgcttggtggaagggattcatgtacccctatccccatccctaaatgagagtgtccacaccacccgccctgagttctgaacttagccacctcatgtacggaaggagaaatggaggccgccagagaggtctaggcctccgaccctgaccttgctcctcttggatggtattgggtggcattccaggacagctgggatcttgatcatccagtgggtgccctcactgtgcacctgcctccaggtggtggcgcggtaattgcaagagcgtgagcccctcctctggggcatgttcttggaaataaatacacctcgtgtcatggagatgggcagacgaggtgccagctatttgaacggacagcccggagtctgtgcaggagttggaggtagagcgggtcgaaggcttgcggagggacaggtgggtctcccatggatggcttttcttggaggctgcagccaggagccattgtttctcttcccacctgaccttgggtggttccccttcagccctggcgttatgatgtcccgcccaacccccgaccgcacacctccctcccccttagctgcttcgaagccaaaggtgtggcaacagctaacaggtgcttggtggtccccgcccaccctccttcaggctccctacacccacctgagtgggcctttctgtgttcacttcagggatgaggcttggagaagagggtgtgtgagggggtgcgggtggccctccagactggacctaggcctgctgcattctgggttgaggtcctcttgctgcctctctgtgagcgagcctcgcctgctgggtgctgagcccacaccgcatgtcctcggcctcccattgagatcagctatacgtgatatagaccagggatgcacgcctcatgaggagacgctcactcccccagacacactgagtactctttcctcaagctcagtgcagttcgtccacgtttgcccagcagcacgcctcccgcagcgttgtcaatatttattcgtggttgccgctgcctccctcctggaccgcccattccctgggccctgtctggtggtggctggccttggagagctggcctctcagcacagcaccgggcaccagggctcaaggtcagtgggtgtgtctttgggtcccttaaggagcaaagtctcataatttgctttattttgttttattattattaattttttttgagacagttctcgctctgtcgcccaggctggagtgcagtggtgcgatctcgtctcactgcaacctctgcctcccgggttcaagcgattcttgtgcctcagcctcctgagtatctgggactacaggcacccgccaccacacccagctaatttttgtatttttggtagagacggggtttcaccatgttggccatgctggtctcgaactcctgacctcaggggatccacctgccttggcctcccaaagtgctgagattacaggcgtgagccaccacgcctggccccttaatttactttaaataaagatctggttctcccagatgaggttcacagacagatgttccaagagcacatctgtctggcatcaggagactcacccataccaagctcacagtgctggccatgatccgactcccgccctgcagctcaagcttggtctggagaccttctctggcacctgccccggctccccagccccgggcttcctgcattgtgtgcttccactcccgtcttctccactaggagctctgtggtacgggctttctgcaccttgacctctgggcctcccaccacagcacggtgaaggcaccaactatttcactgctagatccaaggatgctggggccgggggcagctctgagtgtgtctcatacagtgaccttgtttgaggaggctgtgtaggcccaggattttcctggggtgagggacgccaggttccttgatgtgttgggacaaagacgttggctgggcgaggaggctgcctgagatcccacagtgaggctggccctgcccttgctcgcccagctgatctgacaccctccagatggcccaagagagaccgggaggagcatctggtggaggacctgggtgttctgtctggagatttcccattgcttttccagtttattgtcatctgcttgggacttgagggtaacttcatctctcaaaataggctgagactttttacagttagatatttaatatacagatgacgggcggatggtagtgttgttttaaggggggattttgttgctgtcgttgttgttgttgttttgagacagagtcttgctctgtcacccaggctagagtgcgagctcgatcatagctcactgcaacctcaaactcccaggctcaagtgatcctcccacctcagcatcctgaatagctgggactacaggtgtgcgccaccacgcatggctaattttttgtagagatgggatgttgccatgttacccagactggtcttaaactcctgggctcaactaaaattttaatctccaattcatacatttcagaaagtataataatatgtaaagcaaaatcataatagcaacaacaatcactgtcatcccacgggttggtttagatgtaaattttatgcttccttgcaaaaatttgtcgaaagtgccagaaaagcccttgtcccatatcacagtcccatgacccacactcccatggaaagccttagaactgatgtcagtgtgagccctgtgctggagtggagggtgacagagcttcggacatgagcagcctctgctgctgcggccaccctcgccggccctggatccccacacagtgtggggtgttcaggattcctcatgtgacccttaccctgcctgccctgggactgtgtgcctgtgtgcttgcatgtgtgtatgtgcgtgtgtgcccatatgcgtgtgtaggtgtgtgcatatgtgtatataggtgtgtgcatgtgtgtatatacctgtgtaggtgtgtatgtgtgtacatgtgcattgtagatgtgtgtgcatatggtgacctcagttccaaagctttccatgtgtgtgtccatacacatgtgtaggtgtgtgcctgtgtgtgcatatgcgcatacacatgtataggtgtgtgcatgtgtgcacacgtgcatgtgtaggtgtgtgtgtgcattgtgtgtaggtttgtgcatgtgtgtgcatacgtgtgtgtaggggtgtgcgtgtgtacacatatgcatgtgtgtgtgtgcattgtgtgtaggtttgtgcatgtgtgtgcatacgtgtgtgtaggtgtgcatgtgtgtgcacatatgcgcgtgtgggtgtgtgtgcagtgtgtgtaggtttgtgtgtgtgtgtgcatatgtgtgtgtaggtgtgtgtgcgtgtcagcatatgtgtgtctgcattcactcggccagagctccttgagggcagggtggttcccacctctctgttcccccagctcccagctccggcctggcttttaatcacagagtaagtcaagcctgctttgggagccttctgactcccccagacacactgagtactctttcctcgagctcagtgcagttcgtccacattttcccagcagcacgcctcctgcagcgttgtcaatatttatttgctgttgctgctgcctccctcctggaccgcccattccccaggccctgtctggtggtggccgcccttggggagctggcctctcagcacagcgccgggcaccggggctcaaggtcagtgggtgtgtgtttgggcttgaactgatgtgtgtgtttactgagctttctccgcagcctgctccggcagctccaaaatggcatttcaggaattgaattaccgacatttcagtacttgcggaatccaggaatagattatttgattgtatctgttggaagtcattgccgtaactggcttcgttttcttcaccaacatctaaaccgagtggggagggacagcaggagaatgctgtggtgacttgattttcccaaaagcacatctcccaagctggcggcagccgatggcgttgccctgtgactgggggaagcctgaggactcacggtcgcctcaggctggccaccttcgcactggaacctgcccatcacatcaaggagccctctcaggctgaaaaccctgtgccggggtggctgcagcaacacaaggattcccctccagctctgtgatgtggggagcagagggccactgagtcctgccatgtgagtcacatgatgcccgtggcctgatttctgtgcccccatcttgcctcttagagtttgttgacctcagggctcacatatcccttgtaaggggttgtgatggcttccacggccatcatggctagttaggattttcctccagcccttgaggaattctctcgggattttttctggccttgcctgtctgcagaatccatagaggacctacaggaatgtctgcctctgagtccatagtacttgcaggcctgggaggctggatcaaggtggatgttgacacttggtggggccggagccctggcttcctggctgcctcatagctcaggcccgtttgacagcatttgtgagcacctgtcccaggcaggagcaagttcaacagcagcaagggctccaggcagagggaggtgggctctgatgggactcaggggcagcctaaatgtagcagagaactgagaggggatccctgaggccttcttggaggaggtggtggttaagccagctaactttgtccattggaaactgtcaccaggtccttattaatcaaataataatgaatatgccgtgttcggatccactagggaaagctgaaattgagctcaaaggaggcatagaagttcagcttgtaattttgaaaaaggaaaaggctctggcctcattaggctgcccccagtgtgtccttgagacctccttactccttgagatgtgcttcttaacgttttggaaaaaacaactttctccttctatacttagcccttatctcaatgtgcaggcgcctacctggcccacttatcttcaagaaatgtgctgggttaggcctcaggagtggcaggcacatagatactgtatttggccttggccttctgcccaagtggagtctccgcattcctttgtatgggcccattgggcatgcctggctaatctgcgcaccctctttccactctccttcctgcatttctccttcccttcagtagtggctcccttcccattccccaaatcgcctctgcttttatcttcttccaatcgaattcccgtcagtcgtggagcaggtgggacacctgtgtatgttgcgggggcacagagaagcagcctgtgctcacccatgcctgcctgcaggtgcatgcttgggacttggcagtgggggaagattttggggttaggatttccaggctggcttgacactgacctgttttgttccaacccatacaagccctaaaccctcatgtgcagatcctgctggctctctggggaacacttagttggatgcaggtaggaagaggcttcaaggagcagaggaggggctggctgagggccagccactttgtctggtccccagagcggggtctaacatgtgggaactgagcagcaactgtgagctagccctcaggcaaggctgccccatgatgccagggcacatagggcagactccagatgatggggccactgctggcattggccttttgcagggcacaggagtctgccaggggtgtgttttggagccacccatacaggtgtaccagcttttggaaaatcccaaagatgtggtgccctgctcctgggggtcttgggggctcccaggtagcaacagcgttctgggaggacgtgggctcaaattccaacttttctaccaggttttggctatccttcatccccgtggggctcagtttcctcatctccaagctaagggggcccacctaaagttgtcacagaattggacgtgtgacggggcagcccccttcacctgtgggatccgaggcagagctggcacctccaggctgtgggtccagtgacccggcatggagccagcaaacagaggaggcacctccaggctgcagggtccagtgacctggcatggagcaaacagaggaggccagtgggcaggtgggtgttaccagggcctggagcagcaggggtggagccctggggccaggcagggcgggtttggggtggcatgtggtttgttgtggccctgtcatttgcagtttgggttagtgggtctggctggccaccggggttggaggggaatgccagtgggactatacattgtctccttggaggtgactgtgcccccagaactgagtggacaagccaggcttgtgtccacacctgcccccgtcttttaccctcttctggctctcctccaagaagagcttttcctaaatcattcgccctgttcacctgggctttgaggccccaggtgtaggcccagggggtggggtggggtggggtggatggtctctgactggatagccccacctgggtaggaagcccccagtgtggccccaccttggctgtgacctgggggtcctgcagagtcctgtgtcctgttgcagtgaggggtcagtcagtgggaagagtggacaattaggagacaccatgtctgtctcctcgacgccagtcaacactgttgcctttgttcccagggcagccttccccttgccttccattccaaactcctcctcctccctctaagattccctattcacctcctagaggaggccacctgagtgtcagccaggcactggacctgggcctgcccggaaaggtccctgggcctggtgtgctccaagaacctcgctgtcaggggtcagcgtgccatggaggatagggagaggcatgtgcccttggggacgtctggctttgtccggggggttttctgctgctcactggcttcaggtcagggcttggctctgtgctgcagccttaagccagcgggcccaaccgcctcctccaggcccgccagcgcctcagatgtttctctccttcttagagggtgtttcacatcctttcttttgtttgccctgattatttttgcagatgaaggaatacacacaatggtcatctttgtcttatttgaaagccaaacacgttgcttacacgttgggtgcacagtgaatatgtatcagtccagcgcttttcaccatctggtctggttttagtgttgctttatttctggtcattcctcaatcggggctaaagatcagaaaaatcgcatctccaggtcctgagccatggcgaggaagctgggtggtgccctgtgctgtgcggctaaggtgggggacgagggttgtcggtgggggaagccccatgggggcccactggagtcataggagcgaatggagcacccactccatgccttctgtcaattacaaagcacctattatgtcccggatactgtgtccaacacagtggacacattgatgggtaaggcataatcccccccaggagctcccagttggatcgaggaggcagacaggcgagcgtatggctgtgacacccccagcaactcccagttggatcggggaggcggacaggcgagcgtatggctgtgacacagtggggcaagtggcgtcaccaaggcagaacccagcagccggggcctgaagcccccacacccagctgcagccttcccgaaacagctgagatcagcctggagagctcttcctccctgcctgcccggagggtggcgtgggtcccatcgctctccgtcagccacggccagagcacacctgtgctgctcctcagcagggcatcacctgtggagacggtgacagctgttcctgttccctgccccaaggacaggatctggagcctgtgggtgtgtaaggagccaactccctgaccccaaaactgtggccagttctggagaaggtggccaggctctgggtcccgggactgcggcccccctcctgcctctaaagcccctcttctggcctccatgacttcagcccctcctgcccccagaaggagggatcagccctacaagggacccaagagagggagcctcacacacaggcgctgcctgactctcctccaagctggcctgagccctgggcagtgttctgaggctcagccacacggctgtgcagggcgggtgagagtggcagcctgagagctgcgacccggggccggggttttcctggagcagcaggagggatgagttgggtttctgtaactacaagggccaagaagagggagaggatgatctgggaaggagagtggctttgggccagcatttgggccagcaggactcggaggcgagggaggtggtaagatcccttgcttgggatgagaggcagatggggaaactgaggcttggagcagagggaggggcagggcctgggcccccagcaggtcccagttcatgatggcatgctgcttctgcatgagtgagacatgagggggtcacagacgcccggaagcatcggcatcatcagatcatccgactcgataatagaaaaattaaaatttaaagtcactgaaagtgacgagtgacagaaatgttcctagaaactggagattgggtgctcagcggatctcaggatagatgatatcagacacaacgtcccctgggctgaggtttttttttgttttttgtttttttatgtttcagaattctaaggcaaggatgaaagtcttctctattcttgaggtgctggggttcctcagcctccaccgtccagcctcgagcagctgccccctctcacctgctcctcagccttctggaacagacaggccccccacagcagcccagcccaggccaccagcaccacccccagaggtttatgccatcttcatgcagtgggaggctcagcccccacactgggacctgtccactttagccccaaggatcttaccaaggtcaaatctttggaactcagggtctttgggaacttctgggccagacaacccggccatcacaggggcttctgcggggttggctttatgatgcatttgggtcaggaggtctgtttttatcctttgggcctctgggaaagtccgtcctggccaagtcctctgtcccctagtctcatggctggctggccctggagctcgggtggcctggcccggcccgcctgcttccccacaggcagcggctcttgcttctgctgcctgcagtgctccagatgctgcaggctccttccttccttcagggcatcctaagtcccccgagtctcgaatccccagtctcagctgagtcctcgaggtcagtggggcagaacgccagagccctgggacaacgggctgcataaaacacttattttaattataagagtgatgtaagaacatatcagaaaattggcaaaatacagggcaaaaaaaaaaaaaaatcactggtggtcgccttctcacacagtcacacacagtggtgtgcagccttctggcttttggttgctttgttgcagtattggcacctgcgttacaagattttgtgttgaccattcttgttcttgctgtggtctttaaggtttacagcgacagctgttcctcttcaggatgcaaggagaccgagcctgcctgccctcagggagctgacggtccagcaggaggcatcctgtctgcagggcccatgcgggggacagggcaagaggtgcggtggaaccagaccttgccctccagaaatgcagggagacagacacgggcgtatttaattcaactatagcatgtggttctgagaaggcttcttggaaagggcctggggttgagctgggcaccagcagggaggtctcagagtggaggcggcagttccaccccacggtgtagaggaggcgccctgatcactgcctttcagccgtggccctgcctgtaatcttatcctttttgttgattgttgttggctgatgttggctgttgctgtgtcctccaccagagtggagaactccctggggctggaccccttgtccttattcacccagagaataggtgccttaaaatactgactggacagaaggaggaagagatgggttggggggccgtgtcatggaagaattccttgggccagccgcagaggagtaggccttggcagggagctgggagcctggaggggagctgaagacctctcccatagtcagctgcctttagggaagaaatactagaaagtcacagaagagaaaagaggcggggaaggggaggaaagcatttccacccacagtcctgtcgggagaggtaacattttggagtacagtgtgccctgccccagcaggccctggctggatgcatattcctatagatataattctataagtgagatcattccatatctactattttacaacctgtttttgttttttgttttttccacttagcaacactttgttcttacctagaattcaccaggcaggacagggctgatgagggagcccctcccacctggacactcagtggcccctcccaggactcggggctttcctgggggcctcagctgtggagcaacagctccctgtgcatcagagccgtgggggaggggggccagggggcataggtacgaccaccactcccatttcgtgtcctttaggaagcttgaagaaaagtggttagccaagaacacaaattacggtgatgttgtttgcagtgtggcgtgttgggttaacataaactctgaagtcagaattgacatcaatttgagcccagatcatcctgttagcagctgtgtgacctgggacagggtgcttaccttccagactttagttccctcactgtacaacagggacagggatcatacctttctctgagagttgaaggaagaagtgaaaccaaacacagccccatgacagccccttatgcatggtaggcactcagcaggtgctggctcccttacggcccgaaggaatcgattgacaaactctcaaattaatgacataattcaagagagtagctgcggagacaataaataattatagtagctgatgtggtttggatgcgtgtcccctccaagtccatgttgaaatgtgatccccagcattgcaggaggggtctggtgggagttgattggatcaggggggcagattcctcatgaatggcttgggccatccccctggtgatgagtgagcaatttggtcgattaaaagagtgtgtcacctccctattcttttgttcccactcttgccatgtgacacgttggctccccatcgcctcccaccatgatcgtaagctacaccagaagcagatgctggcaccacgcttcctgtacaggctgcagaactgtgagccaattaagacacttttctttataaattccccagtctcaggtactcctttgtaataatgcaaacagactaacacattagccatagccatttattaacataattttgaaagatttcagtcttgtgctgaaattgttatgttgatggttacacatttgtcaaaacttagtgacctgtacacctaaaaggatgaacttaattgtgtgtaaagtataccttaataaacttgactttacaaaaaaaatccctctttttttttttgagattgggtctcactcacccaagctgcagtgcagtggcacaatctcggctcactgcaacttccacttcctgggttcaagcaatcctcctgcctcagcctcccaagtagctgggattacaggcgtgcatcaccacacctggttaatttttgtattttttagtagagatggggctttaccatgttagccagactggtcttgaactcctgatctcaagtgatctgcccgcctcggcttcccaaagtgctgggattacaggtgtgagccactgcccccagcctttatatctcttgactgtcacaaaatgcatattttatttaagtttgccataaacagaacatttttacatactgtattgtaacagtatataatacaatacataccgtattgtattgtgtgtagtacaatacatagcgtattgtattgtgtgtagtacaatacataccgtattgtattgtgtgtagtacaatacatagcgtattgtattgtgtgtagtacaatacataccgtattgtattgtgtgtagtacaatacataccgtattgtattgtgtgtagtacaatacatgtatgtaatacaatacatactgtattgtattaatcagatatgttgtcctgtgttattaaaatcatcccttgtggcccaaatttgaaggcagtactctgttcctgggtgtgcaccgttaacttctttaatgaacatcctgctgttcaatagtgaggctgcatccttctagaaagcgctgttgagaggtgtgaggaggctgccacgcaggccgcgccgccccgaatggcaggtggaaggcggctgagtggagccgcagcaaatgcaaccctgcccccgagccaggccccaggctgcacctttccactgcttcacaccagcagtgctttacctggaaaggtgtctggacagtgcttgcaaaggtaactggcattctgccggctgctcaactctgtggacaccagtgcagtcaacaactctcactcgccgcgggcacctgctgtgcccacctgctgccatctgagtgtcacgaccacacccccatccctgtcctttcacgcactgtctgcccgcacacactcttccaccctctgtcggcagggcccctgccacctctgaagccccctgccagctctcggcagccccctcctccccctggctcccgtgtcctgcccacctccccacactggcacctcctgagcagccctggctgagcatgcactctgagggcagaccctggccgggcaccgagatacaaaaggttatgagggtgttctcttgaggaactgagtccagtgtgaacagtgaacacagaaacataaagggacaccagaatccccatccccatccccagggtggtgagccaccgaggggggccaggcacgggggagggtattcaagggcggcaagccaccaaggggacggggcaggcacagggagggcatttcagagagtgcaaggaggcggcgaagatgctggttgagggcacgggtgaggcggggaggcgtttcgactttggactgaaggccttaattgaccaaggcggtaatttccagtcctgtgacctcaagacaggctggacattggaggatgggatgacactggctcttctggggtaacttgtctgggtttaaggttcttgatggggtttaggacatggcgggaccctaaggatggtgccagcatctgaattctctgccgtcttgcagagtcaggattctgcagctacttgcccaagaaaaagtagagaaaggtggtttcatgttttttttttttttttttttttttactgctttgaagggaggtgtgggactcgtttgcacacacagttaatatttccaaggcttgtgcagggccagacagatttggttgcagctgttagttttacttcctgtcccgataaaggagggtgcttgcctcagctctcacctgctgccataacaaagctccatggaccgggccgcctaaatgcagacacatactcagctctggaggcgggaggtctagatcagggcgtccgcattgtcaggttctggggagggctcttcctgctttgcaggtggcttttttctctgtgtcctcctgtggaatgagagcaaactatagtcttttcctcttcttacaaggacactaataccatcatgggggcctcactctcctgacctcaccgcaacctaattactttccaaaggccccaccccctaccaccatcgccctcggggttagggcgcctgggtacacatttgaggagagggcacagccgttcagtccatgaccacattgcatgttccagggaggaactggagagaggctgctgtttgctgggcacctgagctggttatagatgttaaatcctcacggtagaaaatgtggaaaatacagaaacaattataatgcataatcctacaattcagagatcatcacagcagacatatgggtccatttcttctggtcagtattcatttacagcgaggcggacagactcatgctgtaattgagtcatgctatgtatttgtttcaggtcccgctttttctttccacttaagacaatatcattcatttcctgtatcattaaaaatatttgcagtcgggtgcggttgctcctacctgtaatcccagcactttgtgaggccaagacgggcagatcacttgaggtcaggagttcgagaccagcctggccaacatggtgaaacccccatctctactaaaaatataaaaatttgtccacctgggccagtgcgtgattccgaagactacatttgaagtccagccttgcagctttccaaaaacccgtgcctccctctttctgcttgtaaatgtccctcacaactggtttcccagaaaaattgtgaggatgagcgaggtgttgcttgtggaagttactttggagggaaagtgtttgtgacaccccatgggtgtggcccatggggctcctgagggtggatggatgtgggagtggacaggcctggctccttttcttggtgggctgggctgggctatgagcaggagctatggccgtggctgacccttctgcaatgggagctgagcagtggtacagttagatagctgcgcagatggtccgatggcccggcctccaaggccttgagtgatgggatgaccatgaccactggatgtctctcaataggctttgccttaaccatgccagcagttcccccatctgctttatcagccctggtatgtacatcagattggctaagggtgcaaaactggaatgctattaaattccagaggctctggtcgcttgaaaagatgagctgaaaataagataaaatttcacagggttaaaggcaggctttgcactctggtttaagtatagagtcgtccattcatgagagtataggtttgggagacaatagcattgaagaggcttgagcgcacactcagaaccagtggctctttcttagtctgtccatgctggctatactgcagcccccctcaactggaatcagatgtggcccaaccatgaatactttggacaaagctcccccaagtcaggcatgccctcttgttagggaaggtggattcctgacctgagtccatctggaggtccaggcaggaattagaaccacttcagaaaagctctgcacagatttaattgcacgagtacctgcgtctcagagctgcagactgagcgtgttgtgcaattgttgggcggcttttcccttggccacagtagattcgcaattaagaaaaacaaatgcagctctcagtcagaagtgtgcaaggtttgcttggtctggagacagcagcttctgtgctctggggtagtgaggaagtgtgtgggcaggttggcaaataagccacatgtatgtcccctgggctcagcccccatcttagtgggcacaccagggcccacgagatctggggactatttatgtagggtctgctggggcaggggtgtgggtgggtgtgcgctgcttgtgttgttgaattgggatttttccagccagaccagtctgctgggacaagccttctggctctgggccaaaggcctccccagctgtgatccattcaggcctagaaagctgggggtgctgactgccatcacccactggcctccatggtgtgtccacagagggccaccttcctgcagggctgagctacttctgtctgggtgtagcttcttgtaaagtccctagcagggttgctccctacaacccacccctccccattttctctttctctctgcatgactattattcactcttcaagtctctgtttagatgtcacctcctctgggaagccttcccagattccaggtggggctggaggcccttctgcggactcccctggcatcctgcactcactcacctatggcacatatcattggccgcaaaatctcctgggcacttatcacactgcgggttccttgaaaacaggaatcattcttgttctctgctgcatcttaggatggtgactggcacatagtaggagtccaattaagaatgttttgaataagcgaaagagtgcctaaatgagacttctattccagcttgaagaccagcccaccaccctgatgagaaagttcaagtgtgggaaccgctggggatcttgatggcctgggtcctctggatcagtgcttgtgcaggacagaggcagccccggagttctcatgggggctggtgagcagagtggggccccaggatgcctgatggcccggtctgaggtgtgcaggtgcccctgaggtgggcaccacccaggagatgcatgtatctgtgaaataccagataggcccttagtctaagcaaggaggcatctaagctccttaaagattccacaaggatgttacgttgtgctttgaacaacagagacgtggctctgctgagccccagccaaagctctgcacagggaccttgactctcccttcccgctgtgtggctccagcaagtttcctcccacctcaggtctgggtttccaggcattaagtgacaaagtggatgcgacgctccttctggactgtaatgcgcactgcgtggagatgttcgtgttccagtgtagacagggcgttgtcacatcaggcaggactacagggacaatgtttgtcagcctgtcttctgggcaacttggggtatcctccctttatatcacctcctgcccaggtgctctgcgccgccagaacatcatgtcatttgggatccctgatggcacattttgagactttggttcacagtaaagattggtcctgtgtgatcttaaagtaatgtggcttaaaaacaaatggctgtcagggaattgtaaatcaaagcaaacaccgatgagaatggcccaaatccaggacactcagcaccaaatgcgagggaggatgtgaagccacaggaagcctcactcactgctggtgggaacgcaaaacagtacagccaccttggaagacagtttgacaaatccttagaaagctaaacacacttttaccctgtgatccaacaatcatgctccttgatatttacccagaggagttaaaaaaacttatgtccacacaaaaacctgcacatgggtgttcatagcgactttattcacgattattcataacagctggaacttggaggcagcgaaggtgtccttcagcaggtgaatggataaattagctgtggtgcatccagacaatggaatattattccacagcactaagaagaaatgagctagcaagccatgaaaagacatgggggaactcatctgcatatgagtaggtgagagaagccaatctgaaaaggctatgcctatggaggattgcaactctatgatatcctaggaaaggcaaagcgatggagataataaacagatcagtggttcctacgggttaggagggagggagggatgagcaggcagagcacagggcatttttaaggcagtgaaactgctctgtgtgatactgtagtgggggagccatgtcattgcacagttgtcaaaacccatagaatatacagcaccagcagtgagtcctaatgtaacctacggacttgggtgataatgacgtgtgaagagacaaggcgggttcatccgttgtaacaaacagccaccctggtagtagggagggcaggaggtatgtagagaactctgtgctttccacgcgattttgctgtgaactaaacagctctaaaaaataaagttcattaattaaaaaaaaaaaaaaaaaaagggaaatgaccacatgcaaagcactgcgtggagggccacgcatcccaagcaagtcagctagagtagaggcaggaaccaaacagctctatgaggttctggatgagaagccgcatgcaccaccccctccctgctcccgtgtgggacccagtgaagacctcctgtgcccggctgcagctgctgagtgtgggagtgtgctctccacagcaaaccagccgtgaaggctgcacaccttcctgtttctgcccagccacaccacagggcactcagcccttttcctgagcacttgaagctgcgtttcctcgagctccttcctgtttaagaacaggaggggagtggcggctcgcttgtgcaccactctccagggcagtggtgtgcgggacaccctgcagcacctttgactcctcctctgggaatgaggcgtggtttaatctgcaaccccttaccattagagtctgcaactagtcaaaaggtgaatctggctgggcgcggcggctcatgcctgtcatcccagcactttgggaagctgaggcaggaggactgcttgagcccaggagtcctgaccagcctgggcaacatagtaagacctcctctctacaaaagtaaacaaaactagcctggtgtggtgtcatgtgcctgtggtcccagctactcaggaggctgaggtaggaggatcacttgagcccaagaggttgaggctgcagtgagccaagatcgcgccactgtgctccagcctgggtgacagagtgagacccaccccccttttttttcagaccgcatcttgctctgttgcccaggctggagtgcagtggcacgatctcggctcactgcaacctccacctcccaagtttaagcaattcttttgcctcagcctgccaagtagctgcgattacaggcacctgccaccacacccagctaatttttgtatttttagtagagactgggtttcactatgttggccaggctggtctcaaactcctggcctcaagtgatctgcccacttcagcctgccaaagtgctgggattacaagtgtgagccacccagccctgagtgagaccctttctcaaaaaaaaaagaaaagaaaagaaaaaaaaaggtaaatctaagaggtgaccagtaggggaatatatttgtcgagtctcctcacctcagcactgttgccatttggagaagcataattctttggtgtgtgcggggaagggggggctgtcctgtgcattgtggggtattgagcagtatccttggccctacccataagatgctagtaggcatgtcccctcaactccccagttgtaataaccaaaaatgtctccagacattgccaaatgtacccgggaaaatcactcaggttgaagtcactaaattatatgtgtgtacatataattacacatgcatatacatcgcgtacacacacacacacccacacacacacacacaccttttgctggtggctctggattggtaagctggctccatggcaagaatcagcatcctaatacttgccccaccctttaaaataaacttcccaatcctaggcagacaaaagaacaaccccagacctcctccctcagggtggggacaaggtgagggaggtggcggcccggcaggaaggtcatttctttcttcagtcacatcagatgagctgcttcccctcactaggagtggatggggctgccagtggtgttcttgcaaaataccccttgtgggaggagaggggtggagggagagaacaccctccacacatccccgtgggatgtctggagggaagggttttgggcacccaccctggggagagaggagagcccaggttaccatctgtggtgtcccctcgctcacactcactactgccctccacaaactgccatgcttgcttggtgcacggtgctgtgctgggcactggggcaaggccccctcccccatggggctacagatgctaatctgcaaatcccagaaaagtggaatctcggtggcagagtggatgaaggggaggtgctcagtgctatgaaagccagcagctgggagtttcaggggcttccctagggagggatcctgagctggggtctgaaggaagagcagttcactggggagttagggagtgttctaggcagagtaaacagtgcagtggcagccggggctggcacttttaaagaaagcctcaagacttctctttctgattgtgaagtgagctgagcagactgaaatcaaagatgtgaaaataaagatagaggcgacaggctgggtgcggtggctcatgcctgtaatcccaacgctttgggaggccgaggtgggtggatcacaaggtcaagagatggagaccatcctggccaacatggtgaaaccccgtctctactaaaaatacaaaaattagctgggcatggtggcacacgcctgtaatcccagctacttgggaggttgaggcaggagaatcacttgaacccgggaggtgaaggttgcagtgagccagcctggcgatagagcaagaccccgtctcaaaaaaaaaaaaaagatagaggtgacaggaagaccccaccatgagtggcctccactgagtgcgcatgtgagtgagcagctgtgcggtggtccttgccatcttcccatcagcccctcccagcccctgggcctggagaggctgagaatctgacctaaggctgcccagtggcgtgaggctggcctgccgagcttacgtccctgggggactccaggaccccagtgcttcctactggtggcttcagctcccggtcacttgtcgggaatgcagtgtccagggctgaacccctggaggttgtgtgggacagggcccaggaatctgcattctagcaagcacctgctccaggcttgcttccctggcagggaggcttggtgatccaagttccttgggtgcagacacttgctgcttctctcggaggccgggctgggctgtgattttttcatccaatgtgctgggctgatttcacttgcggatgcagaatgagaagctgtagaggagatcacggcaagctgtctgcatggacgatggcagaatccggtgtctgcttggccgcgtggtgtcactaataggatttgccgagccttttggatgtttgtggcgcgacggctgctgtgggaacccagaggctgctcatttgcagggaatgaataatttatttctgttttcagatgacttattccttcatctgcagccgagcccccacatgttctgtaggctcctgattaagtgatttcagcaggagaatttggcttaatcccccactgccctggacgcctggttccaggctgctgatttgtcggcctcgtgtcggggggtgtccggagcctctcctctctgggggcttttcttcctgctctgcctgtttgggaagcctctggccactgagcatgtgctggccttgggttttactgctgtctggcaattagaatattaatgtcgataacacagcaggacttgcgtgtgacaagctgagccacataacgtcacagtcgctcttgaacatctcggactttcacatgggccagccacaccccagcctaggttgctccctcacctcctcagggcctccctgatgtcggtttagacatgtgccttccatcctgcctgggccaccatgttgatcctctgggtccattgctcaagagcccaccatggctccctgttggcaaatgcagcctgaattcagtattcaaagccctccgtgaatgggcttggtccttcctccctggcctctcttgcgtggctccatgctctgagctgcctactcgctgactcattcatttaatgtttattctttggttgttgtttcagcactgagtgggtctgtggaatcatttacatgtttattgagagtccccctggctgcagatgctgggcaggggctttgatgtggggagaaagacccccccccaggttacaggtaagccctcccaagtggcccagggccctgggagggggtgaggttgtgtgagatggcagtgtgggagagtctcaaatttttggcatctttaatctgcccactgggtgagattgaggactcaggtgggtgtcaggggctttgaatgccaaaccacaaaggtctgcaggctgggggagctgcaggaggttgtcatcagtggcaggggccttggagcttggtggaggagaccacgcttcagatggccagctggagcaccccccaccagccccgctgcctggaccccttccacctctccatggacccacctcaggccctacccaccctctgcaccgccttgcacggcattgcttaatttcactgcaatggctcactggggctgctttcctccctctcttattgctctctgggtgagagttggtctctggcctccgcatgaggcagggacagtgcccagggagtggccagtgggagaagcggggcttgcaggccaggtgggcccaagtgtgattcctggtgcagtgctggtggctgtgtcgcccggggcaagtggctcagagcctgtttctcatctgcagatggggggatggtctgtacctgtccagcacccatgaggagcaggtggaacaggatgtggcagtcaagggctcctgaggggacccgtaagtgccacattcagccttctgtgttaaggaccatgagtccaaagagtagtcacgtgtgaatccacctccttgtgccagcctcacggcctcctcaggaagggcatggaggagcagtgggatgcccacggtaccgtggaggaagcagtcctggaggaagggtgactggccgagggccatgcggtgacgcactggggactggctctagctgctgtggggcacgtccacgtggagaagcgcttggtgtattcccccaccctctcacccccacagcgttcctggtgctctgggtgcctgctgtttctgagccatctaggtgggcacagggacaacctcaccagggacagtgtggccccatgctggtaagcaggcgatactgaccctggttccaaactgcattcctgttggtcctttgtcttgctcttccggtatcattacgaacacaactttagaaagtttaacagtggtactcagagaggcttgtggccccaactcatgtgacagtgaccaacaggtgaaaggtgacttgtggtctgaacacctgcaagggacacttattccgatgcctgaatctttgcatctctgcccagcagatgacagcacctggagtgttagctggtcatacctggacctgcgagtgtaggtaagacccttcttctcagggcctgtttgctcaactgcacgatggaagggttgggcaagatggatctttcctttcttttcttttcttttctcctttgcagttgaacatttttcttgccactgaaatcacaggtggaggtctgtgtgttcggcaggtgaatggccatgcaggggtggagggaggcctggatgctttttcttccctgcactcgcaggccccccatgggaccctcagcccccagaggacaattggaggcttctggactagggttctaaggtctcctgagaaggtcagaggctcgttgtccggccaagacagacagcagacagttggcgtgtctcagggtaggaggctccccaaatagaaagtactggattgggagcggatttattgttccctgcctccccggggccgtcggcatttcccctgtggctgcctcactgttctgatgttggcaaaggtttgttttatcttcctccttccagaacaggaggtgcctcagtgcctcagatgctgcctgagaaggtcagtggcatctgggagccatggtgagggtggcagtgactgggctcgggaggttccagaattctgttagtgagcagtgagctgttttattttccttcctgcctatggaaggtcctgagtgaacaaacaagtttcagtctcaagacaacacatcgtgtttcgaggtgacctgtccccaccccacccctgtcactgggagaagactgcaggtctcacggtctcccgtctgtctctgctgcccccaggtccagggactcctgcgatttctctccctggtgcctggtatttttgtagcactctctggttttcaaagttttcctacaacaattgtgcttaaaatgaaatataaactccatccccagcccccaagtcccactccctgccgacctcgtctcttactgggaaggcccatctttgtcaccagcagcagctgtgagtgcctcgtcagtgtttaagagtccaggtcgctgcagcatcttggtgtgtactgtggacccattgtgtgtgtgcccccaaattcctgtgctgagaccctcactccgagtaggatgttattaggaggcggggcctttgggaggtaatttggtcattagtgcccttataggaagaggatgcgagccagacctgcctctgctgtctaccaggcaagtatataatgagaaggtgacgtaggaggcgggactcgactccagaggcaggactcagacaccagaccaaattgaggactagctacaacagggccagggtagaaacagctttccctaagacgtgcccaccagtgtgcatgtcagtttaccactgccatggtaatacccggaagttacggctcctttccgtggcaatcatctgacgacctggaaattaccacccttttcctagaaatttctgcataatccaccccctaatttgcatgtaattaaaagtgggaataaatctgattgcagtgccgcctctgagctgctgctctgggcacactgcctgtggggtagccctgccccgcaaggaacagtccctctgctgccgctgggcacagctgcttcagtaaaattgctaataccaccggctcacccttgaattctttcctgagtgaagccaagaaccctcctgggctaagtcccagtttgggggctcacctgccctgcaagatcaggagccatctgtacaccaggaagacagccctccccagaactcaactgtgctggcaccttgatcttggacttccagcccccagaactgtaagaggtaaatgtttgttattgaagccacccagtctatggtaatttgttagagtggcctggaggaagacacagtattaagtaaggcttcgtgtctgacttcactgaacactgcggttgtgagacgcatctgttgtgtggggcactgaggttcattctgattgctttatgggactctgttgtgactgtactccagtttctctgcccgtggaatgtacatggatgtttggatagtttccagggtggggctgggacaaattgtgcagctctgagtgttcctgcacatgctttgtcttggacatgtgtccttctttctgttggacatacatgaaggaggtcagctgctgcttcacggggcatgtgtgtggtcatctttagtaaatatgccagtttttcaaagtggtcatagacagtagattccttttattatgtgacaagagctcaaatgccctggtagtgggagtggcagcaggagctacagtaagacattgcacattctctggaagtcagggatccctgccagtcagttcccagtgccccaggaaccaggggtttggtgctgggcactagtcatgaccactcgcggctcaggtgttgggtggtctttccagaccttcacctgtgtgaagcttgcaacctggatggtctcatgtggacatcttggcttccaccctgtgctctgtgtctggtctcagaccacagcccaccctggtggtctcctcaggacacataggctcctctgtaactcagtttcttgaattgaacaatggaagaaaatgcctctatgaagagaggtcattgtgcaaaacgtctgtgtgacagtattcttggagcaactgtgcttatcacccggaggccacagtggaattagtcatttgaaaaccagtcacctccaaaatagtcataatccaaaaccatccatctttgacttcagactccattataattttttctccctaagggactttgctttgtaattatgttggatttcctaatatattaaaataatttgtcatctcttgagcacacatctgcctgctatgagcaagcaggagaggccacttccggttttctgcaggtcccagtgagcatgtgaagcctgcgcctgggcaagaggttggatactgggaggaagaagcttttccagtaccctttcccaaagaccagccagtgagggaaatgggcaccgaatgcaccccaccccccggcctgggactgggccaagaaggaggaactgaccccagaaatggccccggaaccataacctgcttacactgtgacctgcagtgcccatggtggcagcctgggctgtttctggagttgagcggagagttcctccagtctaaactccttagagaacatgaatattcctgagggcctggggtccggcaccaccttcagtggactggatcaccttcttgaaggcagagagatcttaagagcttatgtctgactgcctacccgatgcccagcactaatctgcatgcaccccactgggccatgggcttctcaaaggtggggacgctgtccctgtacctaacacacatggtgggcactcggcctaggtttgcagggcctgctggggagttctccaaggcagttttatagctcagctccagcaccttcctgggggcccagtcctggatttgaggctgccaggggggtttgcagtcagctaagttggtacccatccatcccttcccctctgtaaggggtgacaagcactaagacctgttatgtcccctggaagctctacactctgtccccttgctcttgtgactctgctctttgctctcctgtccactggcatataggagtaggaggatattgacttagattcctttttattatttttgtttaaatcagctttgtggaaatgtaattcacataccctaccatttacccatttaaagtatacaatgtaaagtatacaattcagtgatttttagcatattcacttgtatgtgcaattatcaccatggtcaattttagagtgctttcatcactccaaaaggaaacccgtaccctttacctgctagcccctctttccccatccgctcttctgccagccccaagaaactacgaatctactttctgtctctgttctggacattttatatagatggaatcataccacatttgtccttttgtgtctggcatctttcattatatttttggggtcttgttgctgtttttgtgacagagtctcgctctgttgcccaggctggagtgcagtggcacgatctcagcttactgcaacctctgcccctccaggtttaagcagttctctgcctcagcctccggagtagctgggattacaggcgcgtgccaccacacccggctaatgttttgtatttttagtagagacgggatttcaccatcttgtccaggctggtcttgaactcctgacctcgtgatccacccaccttggcctcccaaattgctgggattacaggcatgagccactatgccaggctgttgttgttttttaagacgtggtctcgatctatccctcgggcgggagtgcagtggcatgaccatagctcactgcagccttgaactcctgggctcaagtgatccttctgcctcagcctcctgagtagctgggactacccccatgcaccaccatgcctagcttgtttatttatttagtagcgatgaggtctcactatgttgcccaggctggtctcgcagtgctgggctcaagcgatcctcccaccttggcctcccttagggctgggattacaggtgcgagccaccacacctggccaagaattggtattccttaaatatttgtagaattcagtagtgaagctatttggccagggcttttctttgtggatagtgttttgattactaattcaatctcttcacgtgttataagtctttcaaattgtctctttcttgagacagttctggtagtttgtgtctttctacttggcttagattttgcaggcctcccctgctctttcagtcatagttgacatttattgagttctttctatgtaccaagcatttgttgtgcattagctcatttaatctttacaaaaacttgatgagctaggtagtactattgtcatctccattttacaaatgcgggagtggaagcagggagaggtgagataacaggtcaaggtcacactgttaggaaataggaaacagtccagctgggttttgattccagacagtccagccatgcagcccctggccttgccacctccctctgccattctccagagactcggagaggggcctaaggcctgacatgaacaaagggctgggggaggtggggtcggaagggccccaggaaaagcgtgtgtgtgaagggctcagactcccagttggggagttcggatgtccccttctggggctttcatcttctaacctcctctcccaagcgctcagccaaagggcagcacagagcaccctaccctaaggtgtgacgccccagctggcaggactttggagcagtagatctgtgcccagcaggtctgtatgaatcacccaggcctctgcattttgcttttctagaggaagaggcatggcaatttgtaagacaatcgccagacagaaatcgggagcaaccagacataactcaacataattatttctgcataatgacttctgctacttgattctgtctcgagcaatgactgtaatctctatctgtcactgggaagctggtggccagggagcccctgtggcttagagatagagccaggaggaaatttgcaattcgagttaatggagtgttcccaagcagcctgagcgccaatgccttcaaggtctccggaacagcagacccccttcctgctaggaagcctggtgtcagagctggctgggcctcctctgcggagtccagctcatccactttgtcacagatggggaaactggaaatggcagaggtcacaggatgtgcccaaggcacaggccaacctggaaccagcacttcctctccaccctcccaccacccagcattttccccttcagctggcctggctgtggtgggacagagggaagatgcctctgtggagctggtcactgagagtgctggccaggcagggctgcccccaggaagctggagacagtggggcctttgcaaccagatagcgagggacctcaatgtggagattgggtgtgcttgctgagcgtgccagcaggcttgtgctcacctgctccagctgggggcatgcagaggcccctcctaccccaggaggatgcttactcactgcattccatggccttttaaaaatcccctttaggcccgggcgtggtggctcacacctgtaatcccagtactgagggaggccaaggcaggcagatggcttgagcccaggaatttgagaccagcctgggcaatgcagtgagatctcatctctactaaaaatgaaaaaaaaaaaaaaaaagattggggtgcacctgtagtcccagttacttgggaggctgaggctggaggattgcttgagcctgggaggttgaggctgcagtgagctttgattgtgccactgcgctccagcctgggtgacagagcgagatcctgtctcctgaaaaacaaacaaacaaaaaaaaaaccttgtaactaaccagagcagctgaaaagaacagagcatgggtttggggatttgtgttttgggcgccccacaccccatttagccgagtgtcacctgagctggtgtcccggagtctctttccttctccataaacagttgagaatgagctctctgccaggccggtaggaaggggatgatgaaatgaggacctggtacattctgctgctggttccattgctgggtttctcctcgtggagagcccttgaccctgtccaggtcttgatttctcggagtgtcaaagcagtgcgcacggagctgtgagataaattggctgagatcatcgatttgaaaacgccgtgagaaaatatggggcaaggcagagagcacagaggggctttagggcagcgagcccgcgctatgtgatgctgtaatggtgggtgcgcatcggtacacgtttgtcaaagcccgcggagtggcccacgccaagagggaaccctaacgtgagctgcggacctggggggtgatgatggtcagtgcaggtccctcagttgtaacaaatggcctgctctggcaggggatgtggatcgtggggaaggctgtggccgggagtggtgtaaggggtgtgtgggaactttctgctcaattttgttgggaagacctaaaaaataaaatcttttattttattttatttttttgagacaacatttcactgtcacccaggctggagtgcagtggtgtgatctcggctcactgcaacctcagccttctgggcccaggtgatcttcccacctcagcctcccaggtagctgggactacaggcacgcaccaccacgcatggctaattttttgtatttttagtagagatggcatttcatcatgttgcccagggtggtctcgaactcctggagtcaagcaatccacctgcctcagcttcccagagtgctgggattacaggcgtgaacaatggtgtccagcctaaaatctatctttaaaacacacacacacacacacacacacacacacacacacacacacacacactgctatcttaaaagcatagggaccttgcagtgagaatttctggtgggaagatgtatgactttgtcaggtcttgaattctagcagtgagtttacattccataattggcctacaaaattctatatttgggaaacagtagaaatttaactctgagcaagatacaccctatttccaatcacacgtgatgcatctcgggggcattcatttgtcaaacattatttgttgagcacctgctgtgtccaggctctggacgcatagacgtgaaacggacgatttcctgaccttgtggcgctcacagtcaggggggtgggttggtgggtgggtggaaggaggggagaggtgcagcacccccattgtgcaggagcgaggggagccccgctggcacgccgcactgtgctgaggctgggtgttctagggtgaacaagccacttcgtctagtgggtgcttgtaaagcgggatcgttgctatgagagagagaaccttgcgttgggagaaagtaattagggagtgtgcggtagatgcggaagagaaacgggccgtcaggtgaagtgactgtcaggattccatcctggctcggccccttggaagacacatgatcttgcaggtaattagctcctgtaagcctccatttttccccgtctgtcaaatggggatgatgattgtgcctgcctcccagggctgctgtgtggattacgttggataatgagtacaaatgcatagacagcctttagcaaggagcctggttgtatagagctgtcggcctcaacactgttaatacacatatgtaccagaggctgcaggttcacggaggaggagtcaccaatccatgcccggggagcaggcagagaagagggaggcgggcccgtcccgagttcacgccacgtgaaaggtgcttggaacgcttgtgccagagctggcagtgagggttgagggtgggagtggccgagcacctagacacccgcaatgcaaattttccttctcagtctctggatggttttctgagctgagctgcgggctgaatgtcaggtgatgcgtcctgacctcttcctgagcacctagtgtgtgccctgtgctgggcccaggaggcatgctgggggcaatgtgggcctcaaggaggaggtcgggtgatgaggggccaacccaggtatgccagtcaagaaaccgtggaggctggagagaccctgaagggagcagggcacagttgtgggtggcaggcctgggtgtgcctgattccactgaaccctcgtaacagccctgggtgcagagtgtagagtgctgggtgaggacggaggctgtgcgtctgtgatggccccaggtgacaatgctgttgggatttgaacctgagtttgtggaccacagaggtcccggccacacttagtttccatgccagttttgtagtaaccagcaacctcactcgaagggtggccagcatcttaccttggggcttctatcaacgttgtcctgggcttctcgcctgctggggtgcagcggccttgggcatgtgcccctgtccatggtggctggccggaggccgggagccagggctttctgtatgtagcatggcacttgcaaaaactgtgatcccccagcaggcaccacagaagcaaccagagggaggggcatgggctccgggccgggtcgtcacagcctgcgtgacctgtcgctcttctcttccaggggcatggtctagtggcccagtcaggacgcggaaacactccctggaggttctgacccactccctctcagcctccgcctggtctctggtaagtcactcccagaggccgactggctcagggtgggtgaggactgaggatggaagtgggtggctcctgctgtgccgtggggtcctgcccatgtgtggggactggacccagctcagcagaaagagcagggaagactgggcgtggggggcagcccagctagcacccctagacaggtcaggaaactgcggctcggaaatgcagagaaacagccccccaggccccacagccatctcagctctcgccctaagctggccaggtctttctgggtaaatcgcgtgaccttcggtgcttctgtttggcgatttgtcaggggaatgaggggcccagaactttgagaaggacgtgtgggtgagggcaaggagggcactgtcttagtgtccgggtttctttgtcttctatcccctgcagcccctgtacctggaagcttccttctcccaggctcctgtgcatggtcagggccactcagccctctggacccccacccacgccagataagctgtctgcgctgggagctgggcatgtggctctcccctcagagcagttaccgtaggctgccgggcccagggtctgtctgaatccgccaccctgcagccccccaggcccctgcctgctctgggtgcgaggaaggcttgagggagggcaaagtgcttacagcttgaatgcaccaccctggcctggccactggtcgcctctcccccagtgttagcctggcttaggggctttttccatccggaatccttcctggccctgcctgagctaactccgtgagctcgggagggctcctcatgaccctggtcatcctgccagctcccgagacaggaaggcccggccatgtcccggggctgccctcgggtctggagagcctgccagccatgctgtggggctgcccttccagcgttgagggtttggttttgtttgtaagcaaggaaccaggtatgcgatgctggagagtgtgtaattctggctgtgcctcttcacagccccttccaatctcgtgcatattaaggttgataaaaacaccctcttcagggtcaatgcgagatcagacctggagtgaagtgtccctgtggtatctggaccagcaggacctggctgccccacagctcctcctctctctccctcctccctctcatggtctcatgactattatggtgactcttgtcactcaccaccctgccccacctgctcctgcatactgtgagcatcagttggggccatggatgtagcaagggtcagctgtcataggctcccggggggacacctgggggagggacatttggggacagagccccatctggccatgcccagcccctgagagccctcatcaccgacttgcatctggtgagtttggcagggtcctgtataaggattaaagtcctccaagtcctcatacaaagtcgctttccaaaagtctggaattttcttggccctagacacgggagatgctctttataattttcatcttcccactcagaaggaaccacctttgaatactcagccaggctaaaatttggacccaaaacctgttaaagcatcactgtcttaatttcagtgttcatgatggggttctgggctgtgtgaggggtggagggcagataccagtggcaggtttcatctgtggccctggtagatgtgagtcccgcagccggtcagcccagggcccagggcagaccccgggcgtggctgctttcccgctgggcaccaacgcacgcacgtggtgtttccagggcaaagtgagctccccaccctctgcccgtcccctgccccgcccttagatctgcatcccgtgggtggggtgggttttcctgccttcctcttcctgagggaggcgatttctccttccgctttctccttgccacagtagctgctgggttgggaggagacatccaggctggggcctcagcctcagggtgccagttagcgtgtggttagctgagaaaaaagtatttttctcagcagaaaatagacacaactgcatgtgaaggggccacttccactccttcattctccatccaccagccttactggagctagagagtgggggaacatctgggtccgtgttacctggatgtcacctgcatacaaatgtcctggcccgaggccactgtcagcacgggtgcacaggggaggcgcctggcccggcaggtcgtgctgaggctgatacccgtgtcaagaagctggagcaggcgaagagatcagaagagggtagaggaggtggtccgaggtgtccattcccatccccagacccctggggcatttcagtgcacgcacagcaaataatatcactgcaccaccaccaccaccaccaccaccaccaccatcaccaccaccaccaccaccatcaccaccaccaccaccatcaccaccaccaccaccatcaccaccaccaccaccaccaccaccatcaccaccaccaccaccaccaccaccatcaccaccactaccatcatcaccaccaccaccaccaccaccaccatcaccaccaccaccaccaccaccaccatcaccaccaccaccaccatcaccatcaccaccaccaccaccatcaccatcatcaccaccatcaccgccaccatcaccatcaccaccaccgccgccaccaccgccactgccaccgccaccatcaccgccaccactaccgccaccgccaccaccaccgccaccgccaccgccaccaccaccaccacgagttgagggactctgggatcagaaggcactttccagcacattcacaccattggccgtggatgttgtgggtcaggtgatgggcactggaagggccttccgcttctctctgcccctggcccttggtcatgtacagcaggccgctccccgggcagtggagaagcagcacctgcatactaaggctcgagtcccagcctcccctaccagcctccctctccacgtccccagacactcatgcgttccttcccttgaggtgggttcatggagcacgtaccctgtgtcagacaagcttccaggctctgggcttctgatggagaacagaccagagtaaacctggccccaaggaccttgagctccactcaaggggagacagacagtgaactcaacaaaacagaaatgagagaaaggatcaagctggaaaggggataaagaatgagtgtcggttttggatagagtgcttggggaaggccttcctgagatgagacctgaccaaaggcctgcaggaggtcagggacgggcgtgcttctagctaaggagcagctggtgcaaagggcctgtggcagacgtgcacccgtggcaaggagggggcgagcaggcggctcagccaggtcggagtgggtcacacctgaggggcaggacgctggcaaccccgaccgctgaggaagacaggtgcgagcagcatctcggcacagccagacccccaccatacggcagccctctgtgtcccttaaataaggatgcctcctcccaggcttaagagatcattgttgctcatagtgatttgtgtagccaacaattcttctggaagaagttagatgaacagggccatggagatttggggccggaagagcaggaccccaggcttgcctcccctctagtgctggccaggccgtggatcccaggcgggcatctcagagagccatctgagcggcctttctggaagtgccctcctaggcagacgctggtcatgaggcagggcagcggggaagggacaatcctcctgtgttgtacattgagggttatatttagggtgacttgggatgacttggcagtatcacttcctgtggtcgtcccctccagccctcagccacggagggcagatcctgtctgacaagcattgtgggcagacacgtgcctgcacacacgtacacacccacatgcacacatacacacacgcacacacatacacacattgtgggcaggcacaacttggcattctcatctgccctggaattggtggagggctggggacattgtcctggcccttctgcaggaccgccaggtgcctggcgggggaatcctagccgtcagcatctccggagcatctgctccatgtcgggctctgtgtgaagggctgcatccagatcccacatgagcaagaccggcctagcctccccatctggttgggagatgccaggcagaggtggaaggaagggcggctgacctgccccttagtctgctcagccacacaggcagccacagccgaggctgcacaaggacactcccctgaccttgctgcctgctggccccgggtctccaggccaggtccgagccagccaggctcctccccacccatgtcaccggcctctctaggtggagtccacagtgatctttgctccccttccccaggcatccagcaccacaccaggcacagggcctggtatttctgggacagcccagattacacgttttctctcagttaccccctagaatattcttggacttctcagaccccatgtgcaaatttttagcttagaagtaatcactgggatcatagacgatgtttagcaaatatctgttcttttgggtgttcctaggcccccagagggtctccgggaaactggctcttttgctgaggctagagactatctgggctagaatgtgtctgatggggctctcggagggtgcacagacagtgccgcggtggccgaagatccactattccaaggccggatctgcagaggatttggaagttgtctgtaaggagcgcctagatcacccggaccttctctctccctccttgacttccttcctgcctctcgtcaaacaattactgtgtgcttcctgtgttctaggcgctgtgctaataattggttatgggattattcctagccacaccctgggtaaatggaacccagctctctgtccttgggaaaagggtcaggagagaactggggcccagctgggaagctggaggcttgaggctgctggtccatgttggaatgctgtctccctctgccatccagcacccaagcccggcgccaggctcagagcaggaactgaagcttttgctgttgttgttgtttttgttttttgagacagtctcgctgtgtctcccaggctggagtgcagtggtgtgatctcagctcactgcaagctccgcctcctgggttcaagcgattctctgcctcagcctcctgagtagctgggattacaggcgcgcaccaccacgcccggctaatttttgtattttgagtagagacggggtttcaccatcttggccaggctggtcttgaactcctgacctcaggtaatctgcccgcctcggcctcccaaagtgctgggattgcaggcatgagtcaccgcacccggccaggaactgaaccttggtaggagaaggaaagaaggagttcctgtcttgctttcccgaccagactggaagcgctctgagggcgttttacacttcggtgtcttcccagcacttagcattgtggcctgcatgtaaggggtgttccgtgactgcgtgttgattacactttgtgtgtatgggtgggtgcgttgccacaactctccctgcagaatctgtggcctctggtgctgtgatttaaagactaaagatggcaaagagtggcttttatgagctgccccactcctgattataaacacactctctatgagtcagaggcctgggtgatcatggataagtcacttgccaacagttaactccagactgtagctgctggggccaccgagggcggctggaacatcaccattctgtgcctagcgtttcagccgggctgaggccattttattaataatgatttattgtttttattgcttcccagagatattaaacatgaatcaaataatgcatgtgatgattcactggaggttcccttccaaatttaaaaaagaattaaagaaaaagtttttgacgggtgtgctggtgtggacaccaggcaggcacctgagagccctcccaccttgagctcagccgtgggcagcacagcacagggtggaccttgccctgcagacagagccatgcagcctgcgcaaaaccccagggaggacgcgcgtctcacaaacacctcttcagtctaacatttacaatggtatttcttacaaatggtttccacccgagatatattacaatgtggccaaaccccattcatttgggacacataaattcaaaatttggaaatagttcctttggggctcatgaactgatcaagtttagtcatttctcaagcagggacctggcagaaatgttgctttttaccatctactaagacaagagctaggcagctggttctgctgaacaaggtcccggggagagggacaccagtcctggctcagtgagcagctcctcaggtgctttggaagcctcctctggggatagactcaaagaagttttctatttatttatttatttttctttatttttaaatgtttttctcaaggatgttttttagagctagctcatacctcaggggccacactgtccaaacacatattggaccctgatgaggaaagtgagagccgtcagggtgtgtgacatagccactgtcacccaggcctccagctccattctgcagttgaaaatgatgccctcataacaaagagttcttttgtgtgtgtgtgtgtgtgtgtgtgtgtgtgtgtgtgtgtgtgtgacggagtcttgctctgtcacccaggctggagtgcagtagtgtgatcttgtctcgctgcaacctccgcctcccaggttcaaatgagtctcctgcctcagcctcctgagtagctggattacaggtgcctgccatcatgcctggctaatttttgtatttttagtagtgatggggttttaccatgttggccaggctggtcttgaactcctgacttcaggtgatccgcccacctcaccctcccaaagtgctgggattacaggtgtgagccaccgagtccggccaacaaagagttcttatccgttcattacaaacgcccactctttccagtccttacctgatcaagaattcagaggcaatttttcaggtatttttttgactcggactttacaaatttgaactaccattcaagtaattggtctgaattcctaagtttcgatggtatttttctcttccttcttctggctgcctctcctccccataccctgcatttgttaatgtacccatttgttccatattctgtttgttctttattgctctatacactgctccataatgttctctatcatttgtccattcattacccatgaaggtacatgcagaggtcaccagcccagaggtttgtagcagggacaagttacttgctggtggtggtctccccaaaagtttgggcctgcgagtcattgacacctacacactttgaaaacaccccaggatgaagtctgggactggaaggagctcccaccttagccagactctggcctcctccccagctgtgtccccgccagcccttctccagccatgcccttttgcctcccagcacactgaggattcctcctggaatgcccctcaccccgtctttgctgggtgagtgtttccccagccccgctgagctcaggtatcagccccagcgctctgggtaagtctgggaccatctcctacattgtctgcaaaatcctgcagaaagcctggcctgtgctggtcagcaggatgctgcgtttccttttaaacagacccaaagcagtcagcagccacagactccccagagacggagatgagaggagggacctcatgccctgaggcagccccagcctcactcccatgccctgcaggcgctgagcagcccccagatcccgggctcctttgctgccccagggtcgggcagttcttgcatcttggaccgagtgggctctgccctgctgtggcatgactgggcttcttctgtcctttttctttattttctctttgaagaacaggagttggaatttcactcaccctgccccagctggatgtgtctaggccaccgtggtcccaggctctctgcccagctgggcctcaggaccaggttttaatgccgctgcttgggtgtgccgagcgagaagggctcgccaggcagtgcagagattccaccgagcccaggccgcagcccccacctcccgccgggctgtgctcagtgtcaggaatcggctcccaagatggccgcctttcttgtaaagctgtgccaataccccaggcatctgactggtgctttccagctggcactccttttacagattccatttccctttatcctcacaactgctcagtagaacctgcaggcagggacccttattcccattttacagtcaaggaaaataaggcccagagaagttgagacagccaggaccatatggctggagacggggcaggctgggcagagcccccagcagggcccctgggtctgcgggctgctcccagcagcacccctcatatatacaccctcatcctgactgcaggcccctgaagctggcattctggttcaattttacagaggagcaaacaggctgggtctggagcgttgacactggcaactctagcccagccttgcctgactccagggcatggctccaagaccctggaagagctgcctgtccctccatggcccctccagggcgtgctgggtgctggcagggcaggctgaggcactcgacagcagagttggccccgtagtctcagttttgctcccgctagggtgaaacacggttccctggggaagggctgttgctcacctcttggcctggaacatcagggtggaatttgcagacggaattctgccatctgacgcgtagatcttccccccaggcatgggtcagtgcttgagtcattctgcagctggcacaaagagccaggaagaatgcgctccaagatgcctgggagctggcatgccaaatcaccaggcgtcatcagcacagccaagccagggtgggggcctcgggcaggagcagcgccctgccagctctggctgactgcacgaggggccacatctagagggactgatgaaggggcgtctaaagcctcagtatctccagcctgctgtgccctcttacattttctcccaaagagcagtcagcttgcagtatgcgccaagtccccgcaaatgggacgttgggtgattcacatggttgtttcagcttttgagtttttgttgtgtgattgaatagtaatagaattattcttggtgttctatggagcattaccgggtagtggggaggtgggcacactgagcctctactgtttctccccttcacccctccttgctgtcatcaacatgcgttctcctacagtcatgctccgcgctaattcctttagtcattccttccagcattactgaaactggaagagtcttttgtggcatgtggggattcctcgtcgtgcagggcttgagtgccacaggacccagtgctcgctgtccccatgccctggcacacactgttccctttgtcccagctggagaactcctggaacctttaagccctggctcagccctcagctctgtcccatcccagctgacctctgtgctctgcgcccgagctcctgagcccacgtaagtctcttcatgcccatcactgctgtttcatgggcgtgtgtggggggtcacttcaaggagccccaggaagggtctgtgtcttgtccatccacgtgtgactacacccagcatggaacaggactcgggaaccactgaggtgtgggtgaaggaaccagtccagagactccactctcacttcagcctgatgtttctggggtctgtcactgaaaaccccaacttcgccttcaaagcgagatcctgggtgggggcagaggaagtcccaggctctgtggccaggactccacacccagatttccaccgggctcgctctagcctggccctggcacgggtgctgcgtggctctgctccccgcctggcatccggcacccttcacctctgtagaaacacggaactgtcacagggacagacgtacatgggtcgggggttgctttcagaaagtctatggtctcattttggtcctgcctttgagcttccttttcctgctgggttagggttccggacggaaggggagcattctcttgggcgtttcccttttcctgtctccctgttctctccccagaggctcatgtatgtccgtttcactcacctccctttctctgcttgggaggcagctcaaagagctcctctccaaagactcaagctggagtgatgttcgctctatgatgacgccgcactggtccagggaatgatctcactggagagtagcaggaagtcccccatcctgtcccccaccccactggctgaggaccatatagctgggatgtgttcacctgggaaggagattggcaccagtttgataaatggacacccccaagtctggcatggccccaaaactctactctgctgcagctgtttccatgccagaaaacagagatttccagaataccgagtctgaatgtgccttcttggagcagcttcaaatctgagcaggagagcacttgaccatcctaacccctgaccttcctccagcaattcctaaaactggaagagtcacagaatgttagaataagagggatcctagaaaaagaaccactcactcattgctttgttcatttgctcaggcactgtgctaggcgcttggaatacacaaccattcattcaaacatatttattgactgaattgtgtgccaggccctgttttgggccctgtgggggtacagtggtgaacaaaaggaggcagacagtcaagagattttgtaaatatagtgccaggtggcaggaaatgctgagaaaggggtcagggtgagggaccagagggtgagggtggatgctctttgaggtgggtccttggaggaggtttccccacgactgttgagcaagaacatgaacttggagggagtgagccttgcagacactgaggggaaggaagagcagacaggtggagggaactgcaggtgcgaaggccctgaggctggaacacgctgagcagcttctctgactgggacaaatgaaggattctccttcccccaggagctcccagtctaatgaaggaaaaagacaaagaagtgacgcgttcaaagctgagttcatactagaaaaacgctgttagaattcaaagggaagagcagttgtaggggctgggaaaggcaagcctgaggagtgacctttgcattgggctttggtggatgagtaggggttggcagggtggctgaggcgagcgtgccacacgggtgaactcatatctgcagaggcacaaggtgtgcagggacagccacccacacattcctcttcctgtcgcagtagcagcttctgcaagagaaagtacagctcttggggatttcccttttcctttctccacctcttccttctcaccagcttcatttagggcatttcagccttgagagggtggaaaagaaggagagattggtagaggaaggggatttctgtgccctgctgggtctctctctctctctcttctcatatgttatgtttttcttgtaaggttttggggagttgtggggagtttaagaggctggggatgggtaagaagtcaagaaggtttcggttggatttctcaacaacaggtcattggcctggagcccctccagtgggtaaaatgccgtgatgcaacagctttcaggaaggcctccagaaatgagctctaggtcagtgggttgggtttaggtgcaggcacgccctggaactgtcactctagaggtgttactaacctcctctttccccggatctgactcagcagggttggctgttccagctccaaagagaaggaggaaccttttccttctgcagcccctccccaccagcctcattccttagctggggtcagacctggggtcctcactgcagctggcctctggcagcgttctcaggctagccctccctgctgaaaagagaaccgtgtgggactcacaggtaattatgaaatacaaacgccatgatctttcactcaagggcactaaggagtgaataaataaaggataccacagggtgctaatgagcttgaagagtccctgtttggtagccccagatccagggtccctggtatcacccactgaatgctacttctacccagcactgcccacgggaaataaagtgggagacacatacctatgtgattgtaactttttctatagccgcattgaaaagtaaaaaagatgaaatttaaaacttgtttgatttaaaccgttagatcccaaatggtatcatttaccatttcacatgtaatcaagaaagagaaagtattaatgagatattttatgttgttttttttcatatgaagtcgtcaaaatccggcgtgtattttacactaagggcacatatatgagttcagactggcgacggtttatgtgctcagtagccacgtgtggctggttgtgaccatagtggacaaagcagccctagcttataggtggagacacggaggcacctgagaggggcggggtctcagctcaggccctgggagcctgttcaacagctccctctagcgtcggcccagccacacttcagcctggatggtcccagatgcatcggctcctccctgcacctgggtcctggcagccggcacagcctccccgcaatcacccaggggcaaaacgggcccctccttggagaactaccgggaagctaaggctgcaggcagcttgactgtcacttgcttatttggaggaaagaaggacacaggcccgagttgttttgaaaaatgcaatcagccctaggagaggggcttagctgcaggggccgtgtgggtccagcggtcaccgggagaaagaactgggttgggtgctggataagaaagagcacaaacctgtttgtcttccaccggccccttctgccttccaccttcctgttccaccccaggaagaacaagctctcatctcaaatggcctgagccctctgattccttgaagttcaaattcacaacaaacgcctctccagcctcttcctgagcctcagtcttttttttttttttttttttttttttttttgagacagagtctcgctctgttgcccaggctggagtgcagtggcaccacctcagctcactgcaacctccaccctccgggttcaagcaattctcccgtctcaacctcccgagtagctgggactaccaggtgcgtgccaccgcacccagctaattttttatatttttagtagggacggtttcaccatgttgctcaggctggtcttgaactcctgagctcagacaatccactgccttggcctcctgaagtgctgggatgacaggtgtgagccacggcgccccggccagcctgggtctctcataagcatttggtgtttcccacctctctggtcgccttccctcaaagcatctcagagtctggttggcctggcaagcttcggggatctgactgatgaaagcattttggagcaatgggatgagatgccaaccaatgccgtcagccggcactgaggtgggattaacaggacaatcaagccctcggttcccaggagcctcactgagcagctgctagaactgtgccactaaacaggctttaatttacaggcaataccgactctgggttaactatttctcacagggctccccagctgcatgtttacatttctttccttgttcctctttttcttcttcttcttttttttttttttttttttttttttacaattcagcagattaagaacaatagcagggtaactgagaaccacagaggtggctgtaagtgactcattaactccctctcccatgtttccatcaccgtgaattacaacgtcatctctgatgccctcagacagctgttactagtttgatccgagccttgcttgaatatgaatctttttaagccgagcaggagatggttctgctctcaaatagactgccctcccctgggcctcccatttcttaccccaccatcctccttggagatgaaagacttcctgagaaatgaaggctgggtttgcctaattactggagcaaggtggctgttctgctgggaaacgtgagtggtggctttctgtctctgcagaaaggcttgcttttgctcggtcgtcttactagacagccaagcaccaataaggttggctcctttgcttaatgaatgacagaggggtcacagcagcatgcagcattccccccgccccccgtttcttgtgaggcagcctgcgtcgggcccgacagcctccaggagagagctaaaatgaggtccttcagattacatatttcatctgggcccttgttaataagcaaatgctggctgtcccagtgagtgactgggagtgtgtgtgtggccgtcaccttcatttggcattcatgggctccatttaccagtttcataaaagttccagtggggaggccatcttgcaaagctgtcctggcgagcacaagcagagtgctggacaccagccaggagcaccctgggtggcctccacggctgcttatggtcttggcatggaaagggcccagaggaggttacaggacaatgggaaggaggtgggctctccactcagacctcctgggtccacagcccaccaccccaccgaagcctcggtcccttgtccctaaggtggagctgacattgcctcctctcggcctagccaggagtgaccccactttcccagctcctagaatcttcactgtgtcctcccctggatgtggcctacagggactgggcctcctgcagcctttgaaatcctccttgtcattcagttgtgattccaaatgccgttgtcctaggcaagccgccgagtgccccgggaatgagcgactcccctggaccccactttattcactttttatgccccttcctgggcatgcctacaccataactcaagccccccagggagctggtgactggggaccggcatcccagtgctcagcctgggattcggcactcagagggcccgacagcctggaatacactgagcaccccgctggcaccaggccccaaggacaggctgatgtttccacttccctggagaaagatcctccagtcccctgctcggaggctgatcccggctggctgcccgcttgctcagggcaaggaggtaggctggagagggcagacttccctcaactcacccatcttctgtgggttcctcaccagccttcctctgggcctgttgttctcctgtccagtgtctttccagagaagattcctcccccaagctttggagatggggctggggtgggggtggttacctgaccgctgagtcgcagtacagggttccatgttggtcaggggtggctaattgctgtaagaagcaagtgccaacctttgcttggcccagtgaagtggtgtttcctgatgtgttgcagtgggatgtcaccgcaggagacgaaggctctattccacgcagtcacgcaaggacttaagtttcttctttttagaaggtctttcgtctcacagcctttctcagccggggttccaggagggaatcaaggactcacagcaaaggcatcatggtgtgcagggaacgactttcctcctgcatacctggaatgaaaccagttacacaccatccttaggtacatgactggttggggaaatgggcacaccagtcattgactgcaggctgtggttcagatgagaaagcctggttgagaaatgctttagggtctatgccctctggggcctccaagtcctcccctggatagtctgcttccaggtgcccagcaagaaagggcaggaaagggcgtgtgcagcaagggctgccctgacagttatggaggctcaggccagaagtgtggtcatcactctggccacatcccattggccagagtgtagtcacatggtaccacctagctgcaagggaggctgggaaatgtagtccggctgtgtgccctggaagaaaaggcaatagagtaagaagagcacatggtctcggcacaggctctattcttgcacattccttcagactctgcctcccacacctcctgaggctctggggataccctatccctgagccttctggaattttggggccccagttgccctgtttctccttcctggcccccctccctgttcagctgtttgccatctccctgcccacttcccactgatatgtgttggggcttgtggatgtgatcaaggtcataggcacagtctttcttttctttttcttgttctccttgttggggtggggattttttcaaaaggaagcggcaaaggtattgtactatttttgggtccctacactcttctgcctccacattcttctgttgtgtttatgctgctagacctggaaccttaggatgagcaggtcttggcatcagactttgtttgcatcagcagaatcctttctttgaaagagaacagatgcagaaacagatcagagggttgctgctctggtctgtgctgggcctggaggcccagagtccttcctcctcccctgcccatcctgtggacccccaaagccttaggaaggtccctggggctcctgggacacagctcagaggctcctggctggtgtcactcctctctgtgaggcttgaattctctcccttgcattccgaaagtgggtcacactggaataccagctttgtccaaacctccctgcctctggagttagccaaaccttaaagcaggttcttgtgcatgtgtgtatacacagcaactgcaaccacagcaagagtgtccattcacccaacacagacacccaccttgtgccaggcccagctgggtcacctgggagagggtgaagggtaggaagcccttccagaggaggtgctgagtgaggcaggaggccgcaggcgcacacgtctgccctctggcacacgcaggaaggtgctgggaatgcagggagcttctccccagcagaccatgatgcactccgcctgttaccttctagcggtgtgctcactgggtttggcactgcccctaatctggtacctccctttctatacgcatctgtgatttcaggcagataagtgttatgagtttggcattccaatgggatcggtaagaacataaatcaccgatccatcctgggataaatttctcccttcgttctgagaggtgatttggttttcactgaggtgagtggattcttaaggcagtgatcctcaactcccagggcctagaacttcacagaaggtggctcattttgataatgaaaaatgcaggggtgcaaatcaggcagaaagggcctgccactagccaacaatgtgtccatcaccatgtcgcccttgcctgggccagcctcccctctgctgcccatgcaaggcctggggaggaggccagaccgcctgggtccaagccctggctttgcctctcagaggttccggggctctcccagggttggtttacttgtggtgaagcgtgactaataggtaaagtatctgacaaaatgggccccacaggccatggttgctgcttctggctgtccctgctgagagcaggtgtaacgtacctggcatcactcctgccccagagacaccgataacacatgtttgtcagctgtaggtcagttccccaagggtggctgctgtgctactgtaacacgggactgcagactgggcacttaaactacagaactctgttttctcacggtctggaggccagaagtccaaggtgttggcagggttgggtgttggcagggttgggtgttggcagggttgtttcctccagaggcccctctcctagaattgcagatggctgtcattttgctgtgccttcacacggtttcccctgtgtgtctgtgtcctcatctcctcttcttataaggacaccagtcatattggattagggcccaccctggtgacctcattttaacctaatgacctctttaaagactgtgtctccaagtacagtcccattctgagggacctggggttaggactttaacatgggaatttgggggaagcacagttgaggccatagcagcagctgtctcattctgctcacagctggttctctctggccacgtgccagagaggagtacgatgccatccccttaaaccacacacggacatgctgccaggaggaacgtcatcacctttcagctgaaaggagtgaggaatgaggacaagcaggtgcagaacacagccttctcacgtactggtccattctgcacgtgcgctgctgctgttacagcggcagacgggaggctgaactagagacacctaagacaaaccctgctttcccctccagatgctggctgcaagaacgccacagtttgagaggagtgtggacaatagaaagccttgagagcagctgagctgacgaagggatgggaaaatgggcccttttgaagcctaggaatgaccaagtggagatgtgcagggtttgggggtgccccagcttgagtctcagtgctctgagggacatagcgcagagtgggacagcccggtgggtcaacccctgcctggttctgcagacttggagaggtgggacttctgccccaggccgcatggagggccggccctgggctgggtgtgcctcacgctgcctgggagcctcaggcaacctgctgcagctgcttgttttgccactcactggcctgactgcgggagctggaggggctgggaggtcattccctactccacagcttagctcaacctcccaggtgccccgcacccccatccctcccttcccataaaaccagttattcctcatcctcataagcgctcctaggacacttgccatgttctatcagtttgggggttctctggggcagccatccacagatccatgccccgcctatgagccatctcccctctccttctcacccccgtgctccccgtgtggtgtcggcccccgaggcaaggaccgtatgggttttgttcactgcccacactccctctgacacacaggaagttctggaaaagcttccgcatggtgaaggagccacatgcggtttggtcgggtgccccaggcctcctcttgatcatcacgaccaccctgccatccctgttattcggggggagtccagagctccaggaagttgaccacctccccaaggtcccccgagcaggggtgggtggaactggctctgagcccacactcaatgcctttcccctgtgccccggagcctggcttggtgccacccaggacttgtttgtggaagtgacatgtgaacacctagcgagctccatgggctctgcgtgtgtacgtctttgctgactcagtggccccacacagcaacccgagggccagggcagaaagcacaggaggagccaccacgggtgctgcagggcctcaggctgggcatccatcctctacctgtccttctgccgtccatctgtgggttctccctcaggtgccacgcaaggctggtccttcacaatggcccaggccctcaaactcagtggtcaggagggttcccaccacctcagggcttagcggcagtcaaggtaacctcaggtcctcaggctacctttgcaaataggtccttgcaaagaccctaattcacattcacagatactgggagttaggacttcaacatcttttaggcgggccatgattcaacccatgcatctgggcctaggaagtggaactgccccagtgagcgatgccctgggcactgtgcagttctgggggacacagccctgacagccggaggggggctttctgggcacagagctgtctgggatccgccaaggcaacacaggaaggagtccagagctcacctgggtgagacccgagagctgtcagtgacagcagaatccagagggagcccacatctccaagccaggtccagagctcttccaacaggatagcagtcttgtcaggcactctgggaggccaaagtgggaggatcactttggggccaggagttcgagcaacctgggcaacatagcaagatccctatctctacaaacaaaccaaaaacctcagtagcatctttgttgttttttctcttctgtcaggtattttggtagtagtgatcttctgattttacattccctttttttttttttccatgtagaaatctctatggccatttcctcttgtgaattaattgagtttctaaagtgaactagctgcatgttagaaccaggacttttttgagccctttagagcatgctggcaggcgtcatccccaagccccagggtgggtcatatttctggatgatggaggcagggggtgcaggggtcccctatctgcacattgttctgagtctgatgtgattcctcaactcctccatgaaacaggggccatgcttgtcctcgtctggggcaaactgcagttggagaggctggcctcctgtggctgcatatccagagctgggcttaactggccaggaggagagaagaatcctctctcttaataaaaagtccccaggggctgggcacagtggctcacacctgtaatcccagcacattgggaggctgaggcaggtggatcacctgaagtcaggagttcgagaccaggttggccaacatggtgaaaccccatctctactaaaaatacaaaaattagctgggcatggtggtgcatacctgtaattccagctacttgggaggctgaggcacaagaatcgcttgaacccaggaggcggaggttgcagtgagctgagatcgctccattgcactccaacctgggtgacaagagcgaaactccctctcaaaaaaaaacaaaaaaaaaagtccccagggcccatgtccacccagccgtctctctccctcccggccaatgttattctttcctcataagcccttccagagcacaaacacacaagcacgtatgtttgtcttcttttctcataaatggtaacaagctctgcttgctgttgtgcagcttctcttttcacataaaaatacaccttgaagattatttcttatgagtacgtaagatgggcacctgagtagtttgctgttacagaccacgtaggcaatggccgcctgcacagattatttgcacaggtgggagtatcattagatgtttctggaagtgggatggctgggtcaaggtgaatgtgtgtttggaattttgaaagataaagtcataaagataagtaaaaacacctggcatcttggctcacggctgtagtcccaacacattgggaggtcaaggtgggaggactgcttgaagctaggagcttgagactggcctgggcaaaatagtgaggccctgtttctacaaaaaaaaaaaaaattaactgggtgtggtggtgtgtgcccatagtctcagctactcaggaggctgaggtgggaggatcacttgagcaccggaggtcaaggcttcagtgagtcatgatcacacactgcagcctgggtgacagagtgagagcctgtctcaaaaaataaataaataaaaaatagatagatagattgattgattgatatagagaggataagtaaaaacaaaaacatgtatgtactataaaacctgggatgggctgggcgtggtggcttatgcctatactcctaacactttgagaggccaaggcaggcgaatcacttgaggtcaggagtttgagaccaacctggccaacatagtgtgaaaccctgtctctactaaaaatacataaataaataaataaataaatagccaggtgtggtggtgcatgcctataatcctagctactcaggaggctgagttgggaggattgcttgaacccaggaggtggaggttgcagtgagccgagatcacaccactgcacactcctcataagtgcctggaagggcaacacagtgagactccatctcaaaaaaaaaaaaaaaaaaaaaaaaacaaccctgggatagaggcagagaagaaaggaagtggtgggcagtgtgggtggtctgtcttacctttcataatggagagctggtgcctactgtttagaattcacaaacacagagttcaaagtggttgccactgtggctagggtaggagacatctttttatttctcattcttccatgtacttcaaaaattatcacgccctgtatatcagttaactgttaatgtaagaaaataacatgaggtggtgcagtggcagccgtgtgaatgccggttgatcagtcttgcattcaggacttgtggagaaccgccctgggggatggttttgagcagagcagttcctcgttcccacaggtgcctcatttttccctggttccattcagaacatcatttactgcctagagctaattccagatcctcctcccacccggggcagtttatcaaaggcaaaataaagagggtgggccggggacagtggctcacacctgtaatcccagcaccttgggaggccgaggcaggtggatcacctgaggtctggagttcgagaccagcctggccaacatggtgaaaccctgtctctactaaaaatacaaaaaattagctgggcgcggtggtgcatgcctgtaatcccagctactcaggaggctgaggcaggagaattgcttgaacctgggaggcggaggttacagtgagctgtgatcctgctactgcactgcagcctgggcgacaagagcaaaactccatctcaaaagaaacaaacaaataaacaaataaagaaggtgggtgggggtgactccctgaaagtttctagacgcctcttctaaagataaaaacataatgtgatgcctgaaagagggaagaactgccccaaagagtctgggatgtggctgaggtggccactttgccaggagctgatgagggggatgaaagtaagaactgattttaatcttcgcctctcgtacaacccctggtgggcaccggatgatgccctgttccactgattttaagttgcattttcccccccgcatttccacattctccaagtgagaacgtgtcccgcagtgtgagggtgagctgtcgtgatataattagagtctcttggccttcttggtggtccataagatagcggcatgccttccgatgggggacccgggagttgctgagtcgcagcgcttgcacagcgatgggcttatttggtctctccggcacatggctcagccctgctccgtggccgtgggtggcgtccccggctgaccccctgtcttgcaggtgtagtcgccgccgccagccgccatgggcaaacagaacagcaagctgcggcccgaggtgctgcaggacctgcgggagaacacggagttcaccgaccacgagctgcaggagtggtacaagggcttcctcaaggactgccccaccggccacctgaccgtggacgagttcaagaagatctacgccaacttcttcccctacggcgacgcttccaagttcgccgagcacgtcttccgcaccttcgacaccaacggcgacggcaccatcgacttccgggagttcatcattgcgctgagcgtgacctcgcggggcaagctggagcagaagctcaagtgggccttcagcatgtacgacctggacggcaacggctacatcagccgcagcgagatgctggagatcgtgcaggtaccggcgcccgaggccccgggtctcaccgcgggcccaggtcccctcccagctcccagcccccagcccagggcttttttttttttttttttttttaagacaggaatcttgctctagtgactggagtgcagtggcactatctcagctcactgcaacctctgcctcctgggctcaggtgatttttccgcttcagcctcttgagcacctccatgccctgttaatttttttggtatttttgatggtagagagagggttttgccacattatccaggctggtcttgaactcctaggctcaagcgatctgcccgcctcagcctcccagagtgctagaatgacaggtgtgagccaccgtgcctggcctccctgtgttctttatgttcactcgacattgggtctttcttggccaggttgctacctggtgcactttggaaagtgagcagttgtcacctgattgggcagacccttgcaaagggcaatggtaaaagccaatgtttattgatcacttgctatacatcagggccgggtggagcactttgatccgttttcatcttcataacccaacaacgtgggtcattctctgcattttacaaagtctgagactcaaatagatgaatttctaaaaattatattttatatatatttggagatggagtctcactttgtcgcccaggctggagtgcagtggcatgatctcggctcactgcaacctccacctcctgggttcaagagattctcctgtctcagcctcccatgtagctgggattacaggtatgtgccaccgcagccagctaatttttgtatttttagtagagacgaggtttcaccatgttggccaggctagtcttaaactcctcacctcagttgatctgccttcagcctcccaaagtgctaggattacaggcatgggccaccgtgcctggccaagaattgtatgattgctgggctccttggcacttgcaagaggtacctgccaagacctggggaaagccctggatttgagaactcaacagatagcttgtgatgtccccaggaatgcgcagtcatcaagtaaaactgaagcattaacgatcacgagaatcagctcagcacgggaaagacgtcactttaggaggcatctcttcaccttcatgcctatcaacagctctagcagaaaggccatgtttcagaaggaaaccaagttttgttcacttggccaggtgcctaggtatgcgagagagagtagagagcagagctgcccctccctggcattcccctgagtgcctccctgagcccaggagcatccaattctagaactcatggccaggcctgtaatcccaacactttgggtggccgaggctggaggatcgcgtgagcccgggagtttgagaccagcctgggcaatatagtgagactccatctctataaaaaattaaaagagtagcagggcatagtggcatgcacctgtagtcccagctacttgggaggctgagatgggaggattgcttgagcccaggagttcaaggtgacagtgagctgtgattgcactgctgcattccagcctgggtgacagagtgagaccctgcctccaaaaagaccaaaagcaaaataagaaaaaaatggaactcttcagaaggggtggtcccatggtagggaacttcaggggtgggcctccagtagcgggtatcaaatccgtgaacttctgcagcagcagtggcccgcctcaggaatgagcgacccatttcccacgtagatggttttcacactgtcagagtaaattaacatgggctcggggaactctggtactgtcgtcactttctggctcttagcttcatgcagtggcggaagtaagaattctattccccaggaatcacccgtcctgtcctgtgtgttaacccttaccctttgcaaataggtgtgcctgtcactggccgtgcagaggcttggtcagaacatcaaggcactggtagaactgttccaagcagtgaggagcagccacttctgtccaaacgggacagcccccaaaccaagtccccaaaccctgaaagccttcccccgacgccatcgatggctccctggccggctgggtggtgtttctcatgggacacttggttgctacctctttctcacaatgagaaaatggtctgttgtcaggaatgagaatatcaagccaccttcacgtggagtgctcagaaaatcccacagcagtgccaccactccccacgcatgtcactctgctcagtggccactcaccagtcccatcaccgtctcctctgtacacccaccagcagcacagagtcacatgccccaggctgggccactcaggcagagacacgcagagagaccagtggctagactgagccctcggctgacagtgccctaaacaggccatggagaccccagtgctgctgcttcctgtcctgtcggggctggtgatggggcttgccctgtgagtttcagggactcagtctcttttaaactgaggggtaacagccatggagtaaaatgcacacagctcagcaggcagtgtggggaatttcacacatctgtgaccaccactctccctcagcattcccagcccccgacagggacacttaggcaccttcctggcactacccacccccaggcagagataccagcaccctcaccaccctcccagtagaacccttctgccagctctgctcttgaacttcacatagacacccgtgaggttcactagggaacattctccccactggggaagggtcccgaaggccaccgggagcccctgacctctccgagccttgttgtgggctgggcggaagcccacccttgctgcacccgcccaagcccccgggcctctgagcacagtgtcattgcccccatccgcaggccatctacaagatggtgtcgtctgtgatgaagatgccggaggatgagtccaccccggagaagcgcacagacaagatcttcaggcagatggacaccaacaatgacggtagtgcggggtgggggcggggctgcatgtgtacgccacggtaggggcaaaaccatgtggtttggggcaccccctcccctctgcagcttcttggtctcctgagggccacccccgcccgccacctgcctggcgcctgccatgcccagggaagagcgggatgcagtcagggacacccgtgctgtatcctggctcctctgtgcagctttgtgatgctgggcatgttgtggcctctctgagccactgtctccccacttatagaatcgggcatacccatattcccgtgggtacaatgtttaggggcagggaggcaagcatgctggtggccctgaacctggaggggttgagatcaaaggatcccagatgttggggtcctggggtgctggccatgcctctcttgctgccatcctgagagaagaagctgcccagatggccccagtgtccaaggggaactgtcaggatgtacgctgccaccttgtccacctacagcagctctgtggagactcagccccactgcagaagtgcaagtctcacgatggtgggtggcagcagtggtgacagggctgtgcctcgagtgccctcctctgcattggctgtgaggtgagggcggctgtgcggccctcccattctgctcttcttgccggctttgtcaagagcagccacagcaccaggtttgctttgcttttgagcaataaagaaacacgaccttaagaagagaaaatacaggctgggcgcagtggctcacgcctgtaatcccagcactttgggaggccgaggtgggcagatcacgaggtcaggagatcgagaccatcctggctaacacggtgaaaccccgtctctgctaaaaatacaaaaaaattagccaggcgtggtggcgggcgcctgtagtcccagctactcgggaggctgaggcaggagaatggtgtgaacccgggaggcagagcttgcagtgagccgagatcgcaccactgcactccagcctgggcgatagagtgagactccatctcaaaaaaataaagaggaaatactccctgggttgtgctggggattaaacgataagctaatgcccaagaagctgctctgcgaagtctggagtgcagccctcgggtgagttaagcatggccccagcgggagacgggatgtgggggagctgtaagcagcaaagagcattccaggcagccaggtcacagtttcaaaacacacacacacagaaaacaaggctgcctggtgcctggcgttgcctttgggctgatgggaaatgtgtgttccaccctccagcctagcagggcacctgctgccgctctcctgaggctgtccgctcctcgtggggatggtgaatccggtcccatggggttgtgaggtttcagcgagatgatgccttaaagcttttagcagggcttgcactccacaaataatggctgttgttcccaacttcacagtgtccctggggaagccacccatggtcactcgctgcccgaatctgcctcctggcttggccctgcccacctcttcagagggcatcttctaggttggttgggaatttggatggcatggtcgttgctaatgtgcctgctgggatggagcacttcctcctgtgagcccaggggacccgcctgtccctggagcttggggcaaggagggaagagtgataccaggaaggtggggctgcagccaggggccagagtcagttcagggagtggtcctcggccctcaaagctcctccggggactgctcaggagtgatggtgccctggagtttgccccaacttccctggccaccctggaaggtgcctggctgctccaggcctctaggctgggctgatgggtttctccaggacacaagtatcattaaagccaccctctcctcagcttgtcaggccgcacatgtgggacaggctgtgctcagcaaccccctcgcctgccctgccctccatcaggaggagccagtggaaccttcggaagctcccagcatctcagcagccctcagagtcgtcctggggcagctctggttctcctgactggaggtccatctgggctggcctgctctctctcggcctgagacaggagggcctggggtcaggaactggaagtggggaggctggggccgtggactctgaggccccacacctagccaaggagatgaccacacagctggctgccctgagtggtcagaggtggagggtggggagccactctctccattggcagaggttcctggggactgtctgctgagggcctggctgtccctccctctccctacccaccccttagcccgggcattgtttgggctctcttggggccagcaggctgcccaggccccagaggcatcaagttcgtgccctggaagaagccagcctgcccaagcctgggccagagtcccatgaggacaggtgtccctgcctgccagtgggctggaggggctgaattcccagcagggccctactgtgcaggggcatcctccgtcctggtgctggtctgagtcctcaaatgcatcctcccaggtgcctttgagatgggtgttcccattatcccaccttcgagacgaagatcctgagacctggaaacgttggtggcttgccatgcgccagagccgagagcccctcctgcatgccttcccctgtgctgggcctggctgcatgcgtctgtgttgcctgcacagacattttgcagggtgccctagtgattccagctgacagcacagagcctcaaacagacacatggaggggctgccccaggaccaggccgccaggacgcagccaacctcaaacctcatccttccccaccagctggagccagagggaccgcctcctgcccttgaggccatgtctgaacgggcagaatccttacagcctatcctgcttgtggactagcagagccagggctatagtgaccacagtgtgagctcattgacagcggttatgggatggggagcggagggtcagaaaacctcaccccacccagctcagccgatcagccttacggagccctgccctaggccacgagcctccagaggccactcagcccagtgtggagtcaccgagtctgtgtcctgggagagggaatatgttgtcaccagcattggatgcggaggatgagggggcagctgattccttagcacgaccaatctttttctaggttttcctctcaccgcatggggccaaaacagtacagagcatgagtttggtaccccaagcctgagcagcgggtctacgctgatgccagggaggatccggaccgtgcttccgggggcccccaaccagcatggccttctcagcctggattctgtatgggttagaggcaaatgcttcatttttctgcacagtgtacacgttccttaataagcgaagtgtggggtgatttctaaaaggatttaaatggccctcatcagccacgtcctgctgagcttgctgggtaagccctttgaggtacctgatgtattgcagggagcagggaaaggaaaaaggattttttttcagaaatgcctgtaaagtgaatggagactagacaccgtccagcttcaagaaggctcaggactttcaacaaagggagcatacctgacctgagagctgtccccatcctctctggaagcataaagaacagtgagcactggctaatcccattgtctctggtcccctgcaggcaaactgtccttggaagaattcatcagaggtgccaagagcgacccctccatcgtccgcctgctgcagtgcgaccccagcagtgccagtcagttctgagcgagcggcccctggacagttgcagagaaacacaggcttgtcgtgccgtttaagctttgcttgcaagagtggatgccccgcaatcgttcctgctctcccgggccccgggcctggggcatgcgttgcacctgcccggcccggtggctgcgcctccctcctccacctgaccaacgcgacattcctcccctcacgcctggcccggtcccttccagggcaactcccagggatgtggtgacatgcagggttcaagtgttcttggttccaggcacctcccggctcacggggagctcagaggtccatgccgaggagaccaggcaggacctcccgaggctgcgccccggccggcccatgcgttttgtgatcccaagtgactctgtgggaagggtggggacgaggcgtcgggagggtatacagggagcccctcccgtgcatggctgcccccccgttcattttctccaccacagccgcttgcacgtatagatactgtggtcccctttcttttaatatataaattatgtatggtgaagtggagtgtattgtgtaggtcccgtatttaatgcctctgactgcctttgaagcgcagccctctgtggcccgcagccccctgagcctggctgttgtgtggtatttatgctctctttgtctgcctgtttctaaggaaatgcatgtgtgccctgagccgtgatgatcctcccatccgtgttgtgagcacaggcatttgtgtctggtctgtcctccctgttgattggtctggcatttccggtattaaaatgataaaataaatggcattttctgagttttgcgtctgcccgcgggagcccccattcctcaggccgtggcccctgcactctccaggcaaggcgggtgtgctgcgtgccaccgctgttggtaaatccggcccctcttacgtccctccagctgtccccgcgtttataaatcttgcacagcctgttcttcaatatctgcctaatgccaagaaatactcgtggaaataaacgatgactgttcttggcagatctgacggtcaggcttctgcctccccccagcccttccctctccttctccttccacggtttcaggtcgtaggaaagccacattccaagagaggacgggcatagccaagggtgcagtcaggctggacccagaggtggcaggcctggttctccatccagccttcgccgctgccgtcagtgcttctggtcccagcagcagaaggcccagctgaagaagtgggggttggttggtctcgcctgccaagggatccaaaggcagcatcgctggggatccccaggcatcagcttgtctttttttttttctttttttaagagagagtgtctctctatgttgcccaggctggcctcaacctcctgggctccagcaatcctttcgcatcagcctcctgagtagctgggacctcgggtgaacagcactgcgcctcctaatcacagtcagcttttcacctcaggcttgtcttcctggggtgcctacaactgctgttgtggttctgggcagtacagctgacatgggagcatcaagaggcagggagagaagcctctgtcctcccactgagggacaggaaaaccctccagaatctgcccaccaccccgtccccaccagccccacatctcatggctgaaaccatggcctgtgttcacaagatgaccatgtcatggccacggctggcttacgctggtcaagatggcccttggccaaggtggcatctgcctcccccagagggcatagggttgggaaggggtgagtggaatggaggttctattaccaggacgggcactacggcgtctgcccacctgcctgctgctgtcggctcctctgtgcctcagtgtcttcactgtaggggatggggggagctgggtggctcaaggtcacatatgcaaagcgcatggcttggaacctgcctcccagcaggccttcagcaacagcagctaatttgttgattttagtcattttaatattttttaagactccatgtctcttttaatagaaatggtgagtctgtttgccaagtgccttctgagtcaatggcactgctagagctatttcatagtaaaactctccatgcacccagagccaccaagccttgatgggggaaccaggtggggtgcgagatggaggccaggtgccctgggcagatctagcttgctacaaagaggcaagacggtgcctttggcaacactgcctcacctggaagaacagccagtgaacggcttgaattttataaacatttaactgggactggcaaaggttaaatcaagagtgcttgttgtggggagggctcacttatgatggggacagagtccaacagaaacagatgggagtgaccactacattagtcagggttctccaggaacagaactgataggagacatgcatggatgggaggggtgggtggatggatgggtgggtgggtgggtggatggatggatggatggatgtatggatgagtgggtgaggggatgggtgggtgaatggatgggtgggtggatgcatagacaggtggatgcatggatgggtggatggatggctgggtggatgggttggtgaatgggtgggtcggtgggtggatcgataggtggatgggtgggtcgatggatgggtcggtgggtagatggatggatgggagtatgggtggatgggtgggtgggtggatgggtccctaggtggatcggttgatggatgaatgggtggctggatggatggatggatgggtggatggatggttgggtgggtgggtggatggatggatgggtggatgggtgggtgaatggttgggtgggtgggtggatgcatgcatgggtgggtgggtgggtgggtggatggatggatggatggatgggtgaatggttgggtgggtgggtagatgcatggatgggttggtgggtgggtggctggatggatgggtggatgggtgggcaggtgggtggatgtatgtatgtatggatgggtgggtgattggttggatgggagggtggatgcatggatgggtgggcgggtgggtggatggatggatggatggatggatggatggatggatgaatgggtaggcgaatggatggttagatagatgtatttatcataaggaattggcttatacgtgattatggaggctgagaggtcccaaggagacaagcagccctgtcccctgtagacagaggtcagcaagctggggacccaggagagctaatggtgtagttccagtctgaatcttaagggaggaggaggccaatgtcccagctcaagactgtgaggcaaagaacaaattctcaggcttttgtcctattcaggccttcagctgagtggatgaggacccccacattggggagggggatctgctttaccccacctggttcccccattggtcaccagttccaatgtcaaattcatccaaaagcaccctcacaggcacacccaaaataatcggtttgcccaaatgtctgggtaccccctggcccagtcatgttgacacataaaattaaccattataaccacctctgctcagatatggaggaggtagatatggggatcctagtggaccctgccctacaaggagctcacagaagccagtatgatttgtccaggagtccagtgctctctgggaaggcagggaattgaaccccaaagatggtgtccctgtgccaagaagcccagcctatcagaggaggaaagaacccagaagtgaacccaaaactgtcgtccatgccacccacccagcaggaggcctcctcagtctcttcctttgtccgggatcaggatctttcagggcgggttgttagaaagtgtctcggctgggtgcggtggctcacgcctgtaatcacagcactttgggaggccaaagcgggtggatcatgaggtcaggaaatcgagaccattctggctaacacggtgaaaccccgtctctactaaaaatataaaaaattagccgggcatggtggtgggcgcctgtagtcccagctactcaggaggctgaggcaggagaatggcgtaaacccagaagtcggaggttgcagtgagccgagacggtgccactgcactgtagcctgggtgacagagactctgtctcaaaaaaaaaaaaaaaaagaaagaaagtgtctccacctgtccttccctggtaatttgcagtactggccctgggcctgcttcctcttcctccaaccacctccttctgcaagcttctctcttgtcctgccttctccttgccccaggggatcccagaccctttgccatcctgcacgggcactccaagttgttaaagttccttgggagttgcatacaagtgtcccttatcctatagacagatagaagatctaatcatgtacctgcataagcaaggcttatgtgggtggactcaacagaaactctggaaaatggctccggtggctccatggtcccatccaccagctgtcctgacactcactgcatggtgtcccatgctcactgagtaaatacagggtaatgggaacaactcctgagacaggaaaatgtttagactcgaaggaaggaagccctggagtgtggagggaagggtggcagtatgaggtgttagtcccaagacagttcatctagtcaggccacgatgaacccctagtagggcaagactgtcacctcccttactctgaaccttaggccttaattaatacagccccaggcattttctgcttgggtagactggcctcccgcgtgggaaccagcattgagctagcaaaacattagctcccatttatcaagggtttccacgtacagacactgtttaaaactttaaacgtctaatttaaccctcccatcaaccctgcaatgtggtatcactaccacattatacagattgataatgctggtttaagagaagttaagtaactagcctgaaatccttagcaagaggtggcagaatcaggaattgaaagaaggatcagctcccaagtccgaggtgcgtcttctcccgattccagaaaggtcttccagtagctgggctggagccgggtccatgtttccttgccagcggcctccttcagggcccctggtgtctagagaaatgaaggagtttctccctgggtccctgaacaagacttaaacgcactgtatttgtggcacccaggcctgactccctccccaccccgtgccaggtcacgccctagtggagaagggggcgcgcctccccaccactgcctgaggggcgccctcctgagcgcccgtttctcagggcggggcactggactccgaatggaaccctcccctccttgccgggcttaggcaggtacgtcattagatcttctatctgcctcttgagatcaggggtgcgcatgagcagggacccaaaacgggggtccagttaggatcacagccccccaagaggagacagaacccacaggaccttcaggcttctgagagggacctcgtgggccccggaaaaggtatttagaaaaacaggagttcggccttgggttcatccgtggcgtggccttcccccagccgccttgccctgggctgggcgccgttgggaatcaaacccacacgcctggggagctgccagccagcgggagcctcggccgtcggggaacagactccggcttggggcagcctggcagccctgaaaggaacaagaagaaaatggagctgtggggcaggggcggggctcggctcgagaggcaagtggtcccgcgctagtcccacctgtcaccagccacccagtcctgccgctctgaccccgccactgcggcgcaggggcctggtgcccgctggtcctgggctccggctccgggtcggcagcgatgtatcccggcccagagtggggcggggtagggcagggcagggcagggccaaggtcagtttcctttaagctgggcacgccctctccttggcttggggctcccttactgtggcctgggaagaggtctcagaggagacggggtgatgctggagacacggtggcgaaggagcgctgcgggcctgggccccggggggcagctgtttatccagcaaacacctccccagggccagcgcggggcatggcacagcagggcactgccggggcgcaggagctgcgggggcgggtacagccttcctggggcaggaggctggggagggtgggagggagctcgggaggaggggtggctgaggccagcgggggcgggcggggcggcagcccctggagggcccctggaaggcctcagctcctccggctcttcccagcgggctgtgactgtaccatggggccccgacctgaaggggccacctgcctcctgcagtttacgggaaggcagaccctggcccgccctggagccacctgcccacggcctcttccagctgcagccaggccctccgggctcgagcgggctcatccactaggtgtgtgtgtgtgcgtctgtgtgttgtcttgggtgtgtgtgtggctggggcatgtggtcttagtgtgtgctgtggatgtgtgtggtgtgtttgggtgtgtgggaatggtgtggggatggtgtgactttgtgtgtgatgtcgaggtgtgtggtgtgtttgcatgtgtggtggtgtgtgggcatggtgtgaccgtgtgtgcgatgtgtatgtgtgtggtatgtttgcgtgtgtggtggtgtgtggggcatggtgtgactttgtgtgatgtggatgtgtgtggtgtatttgcgtgtgtagtggtgtgtgagggatggtgtgactgtgtgtgtgctgtggatatgtgtggtatgtttgcgtgtgtggtggtgtgtggggcatggtgtaactatgtgtacatgtgtgtgttgtggatgcatgtgtgtctgtgtgtgtcatggtgtgtggggcatggtgtaactgtgtatgctgtggatgtgtgtggtggtgtgtgctgtgtgtgtgtggcattgcgtgtgctgtgaatgtgtgtggtggtgtgtactgtgctgtgtgtgtgtgtgtgtgtgtgtgtggcattgcgtgtgctgtggtggacccgagtccacaggtgggtggcttctggagtgccacatgaggctgttgagtggcagccctggcagctcattccaggagggccaggtggggtgcctgtctccgtggcctgagaggctgggcctgggctctgggcaccctgctccccttcctggcccacctgggcccacagtggcctccctccacactgagcttccctgcaccaggcctgtcctaggcctccatgtcccctcctccagaggtcgccttcggtgacctcatcaaattactctggtcgtctccaccctgaagccctgcgaggctgctcaggaatgagtggggatgaatgaatgaagggagggtcagcaggtggctctgctctgtcttcacgcagctggaaccgcatgagcttatgccctggacacacactgagacccaggccaagtcccagctccacctcgaatgagccgcctggcactggacaagcgctgtgtcttcatctgtaaaccatgtggtcagggaaccaggggcagagggaggggctgcagggccttgaggggaatggcaagggtcctcaggggcaggacctgacctccaggttcctggggacctccgaaggtgggggccccagggttagggtcaggcaccctggcagggatggcagagcatgggagccatgtgtgcgggtgtcttgtggggtgtgtgtgaggctggggcatgtggtcttagtgtgcgctgtggatgtgtgtggtgtgtttgcatgtgtggtagtgtgtgggggatggggagggcggcacaggcagcctcaggtgggctctgcctctggctcagggacaggtgccaggcaccagccccacaggaggggtggcggggggagatctgccctccgcccactcagcctatcatggggggtggtcaggggaggccgggtggggtcaccagtcgctggtgggcacaggggaggattgggaacacctcagaggggattggggccacttcggggacgggcagggggacaggcaggaccaaggctgcagggccccaccagctgtacacagggctggttctacaacatggggcaggggtgcaggggctgggctgggggcttcacctggggggcctcaggaagtgttttgggggtcaggggagtggtctggtcggggactgggctgcctggtgccccttcctcaaagcccccgggaccctggagtggctgagtcgggagctctggatcgaggccacgctccagtctcacagccctgtggctgtcaagggccccctgcgatagtggagctatcagtgtttgcccagtggtcgagtgatttgaccgccttttcctggccccgaccgcgctgccaccgcggggtgctgctgccccctggtgtccatagctaggagggccatccagggcttgggtgtgcgggttccagctgggcctgctttcgagaaaagctttctgtcctgggcggcatttgatgacagaggaggatgctgaggcccagaggagcccctgacttgtggtgggccaaacggcacacaaaagctgaggccaggctcccggtacccaggaccagaggccttattgccagataggaatgccagatacaatacagggcacccagttacacttgaatttcagatcaacgagaagcaattttgcagctgacatatgtcccgtgcagtatcttatctttgtgctaagtctggcaaccctccttgagaagccagggagtggggcctgcacagccctggggcgggtgagaagctggaagggccaggccttctgacaggcacccccagggccaggtgcatgaccctcctggcggaaccacccaggcccagactgaccctcgcccagcagggcaccaggtctcctcccctgcggagccacccccgagctggcccagcctggagacccccgctccccagctcacaagctcacgggcctgagctccacaagtcacctgactgagctccacctaggtaacccctggccagtggcagagcacgcctggtcacagccctctccagcctggagtcagtgctgcatgtggataaaattctccgaactcccaacagcagcaagaattccggaggcgcttccactctgtgccctgcattcgggccttcaccaatcctcccttgtagctgccctgccgtgggtggggggcaccagctcaacccccactcagaaggaggcggccgtggggacccctgtgcctagtgaggcatagggcctgggtctggctagtgcctagtgaggtgtggggcctgggtccagcttcgtctgtccagctccagccgaagctgaagccacagcaggaatgcagggccaggtgccaccgtctgtggtattccggagccatgggtgctcggggctgcctctgccaccctggcagggaataggattggcagagagcaggggccgggaacacgttgcccttggtgagagaaggatgccgcattctagtcatggtcattgttcagcaagagcccaggagcagaagctggctggcgaggcagggccctgaggacacccaggccctccttctaacttacggactcgccttggacgagtcacttggcctctctaggcttcatcccatctgtaaaaaacaagaactgggagaactctgcaaagcctttgcttcacatgacgtcctaccttgaaacccgatgggtgagattgggtgaggcggagaaggcagagccccccacttgcccccctcacccccaggcactgaggcttctcgggaatccctggtggggacagagcccgatttgaaatgggtcgactcttgccttcaggggcagttttccagccgggcccagagatggtgcaaagcaaacccccagatccagcatgggggagggcccatgtcaaagagggtacagggtgacagccagaaaaccccctaagcggaaggggctagccagccacttcgagtcacttaggaaaatctagtaaggagggaacctgcgaagagatgtgtggtcccagtagcagaggtcactgctggggtgtgacgagcacatgacttcacaagacaagccgagtgaggcccgggaaggggcaggccctacccacgagaaagtgcaaagtgggcatcagccagggctcaagagggccgcagggggcacacgtggcttgctctgcccaccggcttctggcctgcccttggttgctgcaggctatctgtgaggggcagtgcctggccctgacactgtcggggagggaggggttgaccacctgctgatgtgccaggaatgttcccatctttggcttctgatgggtctgctgccttcgtcggcctcatgagctgggttggcatgagccagccctcctggaccctgcaaaggtgaggaccaggtcgtgagcaactctaccatgtccccctgagccagtccactgcccaagccaccctccagctgcttaacagcatgttcccagggtagggaaacaccgaatgaatgctggggtcctctgacctggcttgaatgctgcctcactatctgcgtgacttgagttcatctctgagtttatgtcttcacgcgggaaacctattttacaatcctcgtaaagtcagtaatacattccaatatcaaaagcgcagtgtggagccagtccccactctcggcccaggcctctggttcttctgcctagaggcaacctctgttacccgtttcttacaagctcttccagaaatatgccatgcatatgcaagtatgtatgtacacacacagtttgttggggtttgattttgctttttacacacacagtagcatactacacgtgccccttgctttgctatcctcactgaatctagcttggagcttgttccttatcagtactgatgaatctgcttcattcc

SEQ ID NO: 3132 - DNA, 1796 bp, Homo sapiens
gccttcgcgtcccttccttcccggagctggcaggcgggccgcggcggcggcgggcagcggacgggcggactgacgggcgcctccaccttgctccctccctggctgccggcttccttttgtctttctgggcggcgatgagcgcagggccggcgcagcagctgcgggcgcacggaggcccgcgctgctagtcactcctcccggcctcggcgcgcttgtcccgggcagcggcccgggcccgctgcagccgccgccggcgccgaacttgggctcgggaagccggcggaccgcgtcctgcgccggagcaggggcatggtctagtggcccagtcaggacgcggaaacactccctggaggttctgacccactccctctcagcctccgcctggtctctggtgtagtcgccgccgccagccgccatgggcaaacagaacagcaagctgcggcccgaggtgctgcaggacctgcgggagaacacggagttcaccgaccacgagctgcaggagtggtacaagggcttcctcaaggactgccccaccggccacctgaccgtggacgagttcaagaagatctacgccaacttcttcccctacggcgacgcttccaagttcgccgagcacgtcttccgcaccttcgacaccaacggcgacggcaccatcgacttccgggagttcatcattgcgctgagcgtgacctcgcggggcaagctggagcagaagctcaagtgggccttcagcatgtacgacctggacggcaacggctacatcagccgcagcgagatgctggagatcgtgcaggccatctacaagatggtgtcgtctgtgatgaagatgccggaggatgagtccaccccggagaagcgcacagacaagatcttcaggcagatggacaccaacaatgacggcaaactgtccttggaagaattcatcagaggtgccaagagcgacccctccatcgtccgcctgctgcagtgcgaccccagcagtgccagtcagttctgagcgagcggcccctggacagttgcagagaaacacaggcttgtcgtgccgtttaagctttgcttgcaagagtggatgccccgcaatcgttcctgctctcccgggccccgggcctggggcatgcgttgcacctgcccggcccggtggctgcgcctccctcctccacctgaccaacgcgacattcctcccctcacgcctggcccggtcccttccagggcaactcccagggatgtggtgacatgcagggttcaagtgttcttggttccaggcacctcccggctcacggggagctcagaggtccatgccgaggagaccaggcaggacctcccgaggctgcgccccggccggcccatgcgttttgtgatcccaagtgactctgtgggaagggtggggacgaggcgtcgggagggtatacagggagcccctcccgtgcatggctgcccccccgttcattttctccaccacagccgcttgcacgtatagatactgtggtcccctttcttttaatatataaattatgtatggtgaagtggagtgtattgtgtaggtcccgtatttaatgcctctgactgcctttgaagcgcagccctctgtggcccgcagccccctgagcctggctgttgtgtggtatttatgctctctttgtctgcctgtttctaaggaaatgcatgtgtgccctgagccgtgatgatcctcccatccgtgttgtgagcacaggcatttgtgtctggtctgtcctccctgttgattggtctggcatttccggtattaaaatgataaaataaatggcattttctgagtt

SEQ ID NO: 3133 - protein, 193 aa, Homo sapiens
MGKQNSKLRPEVLQDLRENTEFTDHELQEWYKGFLKDCPTGHLTVDEFKKIYANFFPYGDASKFAEHVFRTFDTNGDGTIDFREFIIALSVTSRGKLEQKLKWAFSMYDLDGNGYISRSEMLEIVQAIYKMVSSVMKMPEDESTPEKRTDKIFRQMDTNNDGKLSLEEFIRGAKSDPSIVRLLQCDPSSASQF

SEQ ID NO: 3134 - DNA, 1907 bp, Homo sapiens
agcttctgccaagggtgggggcccacgcggaggcgatccgctcgttcctcccagggccatggggcgacgaggagagccctggcctccccgcgacccgcactgcgacctgggccagacgcgccaccttccccggtcgcggtttgcttctctttaaaatgaggacagctcctcccttgggggctgtggtgacaggtgaaatgagaacgcactgaagacagctcttggtccaaagccccgcacacagggcatggtctagtggcccagtcaggacgcggaaacactccctggaggttctgacccactccctctcagcctccgcctggtctctgggttggctgttccagctccaaagagaaggaggaaccttttccttctgcagcccctccccaccagcctcattccttagctggggtcagacctggggtcctcactgcagctggcctctggcagcgttctcaggctagccctccctgctgaaaagagaaccgtgtgggactcacaggtgtagtcgccgccgccagccgccatgggcaaacagaacagcaagctgcggcccgaggtgctgcaggacctgcgggagaacacggagttcaccgaccacgagctgcaggagtggtacaagggcttcctcaaggactgccccaccggccacctgaccgtggacgagttcaagaagatctacgccaacttcttcccctacggcgacgcttccaagttcgccgagcacgtcttccgcaccttcgacaccaacggcgacggcaccatcgacttccgggagttcatcattgcgctgagcgtgacctcgcggggcaagctggagcagaagctcaagtgggccttcagcatgtacgacctggacggcaacggctacatcagccgcagcgagatgctggagatcgtgcaggccatctacaagatggtgtcgtctgtgatgaagatgccggaggatgagtccaccccggagaagcgcacagacaagatcttcaggcagatggacaccaacaatgacggcaaactgtccttggaagaattcatcagaggtgccaagagcgacccctccatcgtccgcctgctgcagtgcgaccccagcagtgccagtcagttctgagcgagcggcccctggacagttgcagagaaacacaggcttgtcgtgccgtttaagctttgcttgcaagagtggatgccccgcaatcgttcctgctctcccgggccccgggcctggggcatgcgttgcacctgcccggcccggtggctgcgcctccctcctccacctgaccaacgcgacattcctcccctcacgcctggcccggtcccttccagggcaactcccagggatgtggtgacatgcagggttcaagtgttcttggttccaggcacctcccggctcacggggagctcagaggtccatgccgaggagaccaggcaggacctcccgaggctgcgccccggccggcccatgcgttttgtgatcccaagtgactctgtgggaagggtggggacgaggcgtcgggagggtatacagggagcccctcccgtgcatggctgcccccccgttcattttctccaccacagccgcttgcacgtatagatactgtggtcccctttcttttaatatataaattatgtatggtgaagtggagtgtattgtgtaggtcccgtatttaatgcctctgactgcctttgaagcgcagccctctgtggcccgcagccccctgagcctggctgttgtgtggtatttatgctctctttgtctgcctgtttctaaggaaatgcatgtgtgccctgagccgtgatgatcctcccatccgtgttgtgagcacaggcatttgtgtctggtctgtcctccctgttgattggtctggcatttccggtattaaaatgataaaataaatggcattttctgagtt

SEQ ID NO: 3135 - protein, 193 aa, Homo sapiens; identical to SEQ ID NO: 3133

SEQ ID NO: 3136 - DNA, 1806 bp, Homo sapiens
cgggccgcggcggcggcgggcagcggacgggcggactgacgggcgcctccaccttgctccctccctggctgccggcttccttttgtctttctgggcggcgatgagcgcagggccggcgcagcagctgcgggcgcacggaggcccgcgctgctagtcactcctcccggcctcggcgcgcttgtcccgggcagcggcccgggcccgctgcagccgccgccggcgccgaacttgggctcgggaagccggcggaccgcgtcctgcgccggagcagatgacagcacctggagtgttagctggtcatacctggacctgcgagtgtaggggcatggtctagtggcccagtcaggacgcggaaacactccctggaggttctgacccactccctctcagcctccgcctggtctctgtcgccgccgccagccgccatgggcaaacagaacagcaagctgcggcccgaggtgctgcaggacctgcgggagaacacggagttcaccgaccacgagctgcaggagtggtacaagggcttcctcaaggactgccccaccggccacctgaccgtggacgagttcaagaagatctacgccaacttcttcccctacggcgacgcttccaagttcgccgagcacgtcttccgcaccttcgacaccaacggcgacggcaccatcgacttccgggagttcatcattgcgctgagcgtgacctcgcggggcaagctggagcagaagctcaagtgggccttcagcatgtacgacctggacggcaacggctacatcagccgcagcgagatgctggagatcgtgcaggccatctacaagatggtgtcgtctgtgatgaagatgccggaggatgagtccaccccggagaagcgcacagacaagatcttcaggcagatggacaccaacaatgacggcaaactgtccttggaagaattcatcagaggtgccaagagcgacccctccatcgtccgcctgctgcagtgcgaccccagcagtgccagtcagttctgagcgagcggcccctggacagttgcagagaaacacaggcttgtcgtgccgtttaagctttgcttgcaagagtggatgccccgcaatcgttcctgctctcccgggccccgggcctggggcatgcgttgcacctgcccggcccggtggctgcgcctccctcctccacctgaccaacgcgacattcctcccctcacgcctggcccggtcccttccagggcaactcccagggatgtggtgacatgcagggttcaagtgttcttggttccaggcacctcccggctcacggggagctcagaggtccatgccgaggagaccaggcaggacctcccgaggctgcgccccggccggcccatgcgttttgtgatcccaagtgactctgtgggaagggtggggacgaggcgtcgggagggtatacagggagcccctcccgtgcatggctgcccccccgttcattttctccaccacagccgcttgcacgtatagatactgtggtcccctttcttttaatatataaattatgtatggtgaagtggagtgtattgtgtaggtcccgtatttaatgcctctgactgcctttgaagcgcagccctctgtggcccgcagccccctgagcctggctgttgtgtggtatttatgctctctttgtctgcctgtttctaaggaaatgcatgtgtgccctgagccgtgatgatcctcccatccgtgttgtgagcacaggcatttgtgtctggtctgtcctccctgttgattggtctggcatttccggtattaaaatgataaaataaatggcattttctgagtt

SEQ ID NO: 3137 - protein, 193 aa, Homo sapiens; identical to SEQ ID NO: 3133

SEQ ID NO: 3138 - DNA, 1821 bp, Homo sapiens
aagcctgctttgggagccttctgactcccccagacacactgagtactctttcctcgagctcagtgcagttcgtccacattttcccagcagcacgcctcctgcagcgttgtcaatatttatttgctgttgctgctgcctccctcctggaccgcccattccccaggccctgtctggtggtggccgcccttggggagctggcctctcagcacagcgccgggcaccggggctcaaggtcagtgggggcatggtctagtggcccagtcaggacgcggaaacactccctggaggttctgacccactccctctcagcctccgcctggtctctgctggggtcagacctggggtcctcactgcagctggcctctggcagcgttctcaggctagccctccctgctgaaaagagaaccgtgtgggactcacagtcgccgccgccagccgccatgggcaaacagaacagcaagctgcggcccgaggtgctgcaggacctgcgggagaacacggagttcaccgaccacgagctgcaggagtggtacaagggcttcctcaaggactgccccaccggccacctgaccgtggacgagttcaagaagatctacgccaacttcttcccctacggcgacgcttccaagttcgccgagcacgtcttccgcaccttcgacaccaacggcgacggcaccatcgacttccgggagttcatcattgcgctgagcgtgacctcgcggggcaagctggagcagaagctcaagtgggccttcagcatgtacgacctggacggcaacggctacatcagccgcagcgagatgctggagatcgtgcaggccatctacaagatggtgtcgtctgtgatgaagatgccggaggatgagtccaccccggagaagcgcacagacaagatcttcaggcagatggacaccaacaatgacggcaaactgtccttggaagaattcatcagaggtgccaagagcgacccctccatcgtccgcctgctgcagtgcgaccccagcagtgccagtcagttctgagcgagcggcccctggacagttgcagagaaacacaggcttgtcgtgccgtttaagctttgcttgcaagagtggatgccccgcaatcgttcctgctctcccgggccccgggcctggggcatgcgttgcacctgcccggcccggtggctgcgcctccctcctccacctgaccaacgcgacattcctcccctcacgcctggcccggtcccttccagggcaactcccagggatgtggtgacatgcagggttcaagtgttcttggttccaggcacctcccggctcacggggagctcagaggtccatgccgaggagaccaggcaggacctcccgaggctgcgccccggccggcccatgcgttttgtgatcccaagtgactctgtgggaagggtggggacgaggcgtcgggagggtatacagggagcccctcccgtgcatggctgcccccccgttcattttctccaccacagccgcttgcacgtatagatactgtggtcccctttcttttaatatataaattatgtatggtgaagtggagtgtattgtgtaggtcccgtatttaatgcctctgactgcctttgaagcgcagccctctgtggcccgcagccccctgagcctggctgttgtgtggtatttatgctctctttgtctgcctgtttctaaggaaatgcatgtgtgccctgagccgtgatgatcctcccatccgtgttgtgagcacaggcatttgtgtctggtctgtcctccctgttgattggtctggcatttccggtattaaaatgataaaataaatggcattttctgagtt

SEQ ID NO: 3139 - protein, 193 aa, Homo sapiens; identical to SEQ ID NO: 3133

SEQ ID NO: 3140 - DNA, 1724 bp, Homo sapiens
caagcctgctttgggagccttctgactcccccagacacactgagtactctttcctcgagctcagtgcagttcgtccacattttcccagcagcacgcctcctgcagcgttgtcaatatttatttgctgttgctgctgcctccctcctggaccgcccattccccaggccctgtctggtggtggccgcccttggggagctggcctctcagcacagcgccgggcaccggggctcaaggggcatggtctagtggcccagtcaggacgcggaaacactccctggaggttctgacccactccctctcagcctccgcctggtctctggtgtagtcgccgccgccagccgccatgggcaaacagaacagcaagctgcggcccgaggtgctgcaggacctgcgggagaacacggagttcaccgaccacgagctgcaggagtggtacaagggcttcctcaaggactgccccaccggccacctgaccgtggacgagttcaagaagatctacgccaacttcttcccctacggcgacgcttccaagttcgccgagcacgtcttccgcaccttcgacaccaacggcgacggcaccatcgacttccgggagttcatcattgcgctgagcgtgacctcgcggggcaagctggagcagaagctcaagtgggccttcagcatgtacgacctggacggcaacggctacatcagccgcagcgagatgctggagatcgtgcaggccatctacaagatggtgtcgtctgtgatgaagatgccggaggatgagtccaccccggagaagcgcacagacaagatcttcaggcagatggacaccaacaatgacggcaaactgtccttggaagaattcatcagaggtgccaagagcgacccctccatcgtccgcctgctgcagtgcgaccccagcagtgccagtcagttctgagcgagcggcccctggacagttgcagagaaacacaggcttgtcgtgccgtttaagctttgcttgcaagagtggatgccccgcaatcgttcctgctctcccgggccccgggcctggggcatgcgttgcacctgcccggcccggtggctgcgcctccctcctccacctgaccaacgcgacattcctcccctcacgcctggcccggtcccttccagggcaactcccagggatgtggtgacatgcagggttcaagtgttcttggttccaggcacctcccggctcacggggagctcagaggtccatgccgaggagaccaggcaggacctcccgaggctgcgccccggccggcccatgcgttttgtgatcccaagtgactctgtgggaagggtggggacgaggcgtcgggagggtatacagggagcccctcccgtgcatggctgcccccccgttcattttctccaccacagccgcttgcacgtatagatactgtggtcccctttcttttaatatataaattatgtatggtgaagtggagtgtattgtgtaggtcccgtatttaatgcctctgactgcctttgaagcgcagccctctgtggcccgcagccccctgagcctggctgttgtgtggtatttatgctctctttgtctgcctgtttctaaggaaatgcatgtgtgccctgagccgtgatgatcctcccatccgtgttgtgagcacaggcatttgtgtctggtctgtcctccctgttgattggtctggcatttccggtattaaaatgataaaataaatggcattttctgagtt

SEQ ID NO: 3141 - protein, 193 aa, Homo sapiens; identical to SEQ ID NO: 3133

SEQ ID NO: 3142 - DNA, 1969 bp, Homo sapiens
gccttcgcgtcccttccttcccggagctggcaggcgggccgcggcggcggcgggcagcggacgggcggactgacgggcgcctccaccttgctccctccctggctgccggcttccttttgtctttctgggcggcgatgagcgcagggccggcgcagcagctgcgggcgcacggaggcccgcgctgctagtcactcctcccggcctcggcgcgcttgtcccgggcagcggcccgggcccgctgcagccgccgccggcgccgaacttgggctcgggaagccggcggaccgcgtcctgcgccggagcaggggcatggtctagtggcccagtcaggacgcggaaacactccctggaggttctgacccactccctctcagcctccgcctggtctctgggttggctgttccagctccaaagagaaggaggaaccttttccttctgcagcccctccccaccagcctcattccttagctggggtcagacctggggtcctcactgcagctggcctctggcagcgttctcaggctagccctccctgctgaaaagagaaccgtgtgggactcacaggtgtagtcgccgccgccagccgccatgggcaaacagaacagcaagctgcggcccgaggtgctgcaggacctgcgggagaacacggagttcaccgaccacgagctgcaggagtggtacaagggcttcctcaaggactgccccaccggccacctgaccgtggacgagttcaagaagatctacgccaacttcttcccctacggcgacgcttccaagttcgccgagcacgtcttccgcaccttcgacaccaacggcgacggcaccatcgacttccgggagttcatcattgcgctgagcgtgacctcgcggggcaagctggagcagaagctcaagtgggccttcagcatgtacgacctggacggcaacggctacatcagccgcagcgagatgctggagatcgtgcaggccatctacaagatggtgtcgtctgtgatgaagatgccggaggatgagtccaccccggagaagcgcacagacaagatcttcaggcagatggacaccaacaatgacggcaaactgtccttggaagaattcatcagaggtgccaagagcgacccctccatcgtccgcctgctgcagtgcgaccccagcagtgccagtcagttctgagcgagcggcccctggacagttgcagagaaacacaggcttgtcgtgccgtttaagctttgcttgcaagagtggatgccccgcaatcgttcctgctctcccgggccccgggcctggggcatgcgttgcacctgcccggcccggtggctgcgcctccctcctccacctgaccaacgcgacattcctcccctcacgcctggcccggtcccttccagggcaactcccagggatgtggtgacatgcagggttcaagtgttcttggttccaggcacctcccggctcacggggagctcagaggtccatgccgaggagaccaggcaggacctcccgaggctgcgccccggccggcccatgcgttttgtgatcccaagtgactctgtgggaagggtggggacgaggcgtcgggagggtatacagggagcccctcccgtgcatggctgcccccccgttcattttctccaccacagccgcttgcacgtatagatactgtggtcccctttcttttaatatataaattatgtatggtgaagtggagtgtattgtgtaggtcccgtatttaatgcctctgactgcctttgaagcgcagccctctgtggcccgcagccccctgagcctggctgttgtgtggtatttatgctctctttgtctgcctgtttctaaggaaatgcatgtgtgccctgagccgtgatgatcctcccatccgtgttgtgagcacaggcatttgtgtctggtctgtcctccctgttgattggtctggcatttccggtattaaaatgataaaataaatggcattttctgagtt

SEQ ID NO: 3143 - protein, 193 aa, Homo sapiens; identical to SEQ ID NO: 3133

SEQ ID NO: 3144 - DNA, 1520 bp, Homo sapiens
ctaaacggcctggggagtcactgcaggggcatggtctagtggcccagtcaggacgcggaaacactccctggaggttctgacccactccctctcagcctccgcctggtctctggtgtagtcgccgccgccagccgccatgggcaaacagaacagcaagctgcggcccgaggtgctgcaggacctgcgggagaacacggagttcaccgaccacgagctgcaggagtggtacaagggcttcctcaaggactgccccaccggccacctgaccgtggacgagttcaagaagatctacgccaacttcttcccctacggcgacgcttccaagttcgccgagcacgtcttccgcaccttcgacaccaacggcgacggcaccatcgacttccgggagttcatcattgcgctgagcgtgacctcgcggggcaagctggagcagaagctcaagtgggccttcagcatgtacgacctggacggcaacggctacatcagccgcagcgagatgctggagatcgtgcaggccatctacaagatggtgtcgtctgtgatgaagatgccggaggatgagtccaccccggagaagcgcacagacaagatcttcaggcagatggacaccaacaatgacggtagcaaactgtccttggaagaattcatcagaggtgccaagagcgacccctccatcgtccgcctgctgcagtgcgaccccagcagtgccagtcagttctgagcgagcggcccctggacagttgcagagaaacacaggcttgtcgtgccgtttaagctttgcttgcaagagtggatgccccgcaatcgttcctgctctcccgggccccgggcctggggcatgcgttgcacctgcccggcccggtggctgcgcctccctcctccacctgaccaacgcgacattcctcccctcacgcctggcccggtcccttccagggcaactcccagggatgtggtgacatgcagggttcaagtgttcttggttccaggcacctcccggctcacggggagctcagaggtccatgccgaggagaccaggcaggacctcccgaggctgcgccccggccggcccatgcgttttgtgatcccaagtgactctgtgggaagggtggggacgaggcgtcgggagggtatacagggagcccctcccgtgcatggctgcccccccgttcattttctccaccacagccgcttgcacgtatagatactgtggtcccctttcttttaatatataaattatgtatggtgaagtggagtgtattgtgtaggtcccgtatttaatgcctctgactgcctttgaagcgcagccctctgtggcccgcagccccctgagcctggctgttgtgtggtatttatgctctctttgtctgcctgtttctaaggaaatgcatgtgtgccctgagccgtgatgatcctcccatccgtgttgtgagcacaggcatttgtgtctggtctgtcctccctgttgattggtctggcatttccggtattaaaatgataaaataaatggcattttctgagtt

SEQ ID NO: 3145 - protein, 194 aa, Homo sapiens
MGKQNSKLRPEVLQDLRENTEFTDHELQEWYKGFLKDCPTGHLTVDEFKKIYANFFPYGDASKFAEHVFRTFDTNGDGTIDFREFIIALSVTSRGKLEQKLKWAFSMYDLDGNGYISRSEMLEIVQAIYKMVSSVMKMPEDESTPEKRTDKIFRQMDTNNDGSKLSLEEFIRGAKSDPSIVRLLQCDPSSASQF

SEQ ID NO: 3146 - DNA, 55546 bp, Mus musculus
  misc_feature (1)...(55546): n = A, C, G, or T/U
ttcaggactcagaggaagaccaagctgcacatctgctacatatgttcagggaagcctagttccagctaatgtatgttctttggttggtgtttcagactaaagagagccctaaaattgcaggttagttgactctgttggtcttctggtggagttcctatctcctgctgggctcataatccaatttagcaatgggcaaaggatttgagtaaacatttattcagagaaaggacacaaaaccacaaaagacaagatgcttagatcctgagtcattaggaaaatgctaatcaagatcatagtaacatatcactgcatgcccgttagaatgtctgtaataaaaatgagcaacaatgaagtttgggaataatacataaaaactgtaatgccctctgatgctggtgggaatgttctcagccactgagaaaacaacatggcagctcctccaaaagttagccaaagttacctcaaactcaacaatttcactcctgcacatctatatagagaggatatcttatctctgtataaatgtggcacctgtcaataataaatctaatggtctatggcttaggcaggaaataggaggtgagacatctgggagagagaggattctgggatagagtcaggagcaggaagattcacccaggaaggtgtgaggagacagaagcatggtacctaaacacaggtaaccatccacgtgccagaatgtaggttaaaataaatgggatattttaagctatccgtggttagaaaatagtctagctatatgaccaaggtaaggatattagaagattcagagatgaagaatacagaacaaagtgtttctgtgacttcttgatcactctacacatggagtaaggtgtcagctccctccccacatgcagttagccactgtgcatttgattgccatcatcatagaaaattagtacagaaaaatataactctgaagtaatctctccatttcagctattagaaatacgtcagataagctcatggatactcttggcaagtgaagctttgtaatatctggacacttttaaatatgcaataattagttttgaactatttgtctaagaaaagcaatattctgtgaaatatgttgatacctatattatcttgttaaaattaatagtaaaagaatacaatgaggttttgacagctgctgattgacaggtgtgaccagtgtttcaagagtgcatacttgttcggtcttctcaaagaccttatataagaataaatgtttacctgtctatccattagagttcaatgggaaacaggataatctctgggcattttaagtagacagagattatctataaggaattaaaagcttacaaaataattagaaaggaaaaagatagcgattctaggctgagcatcaagaaatgtttccagaatattctacaattggctaggatggggactactgtttctgactcagtggggaaggtgacaaattcagaagtcactataaaatcatagtaaaatatgcctttgcaattagaatgaaaggaccaggtgcccccatagctgtaactcaacagcctctcaaactggtgcatctctagctcagatgcaggagcctagcatagaaaagctaagatcacttagcagaaagcaaagatagtggtaggaagaggagtcctgcctctaaatgcctccaactgaacctaatctgcttcaatggcacgaaaatccagagaattccattttcagccctttggtctctgtagtataaaaatgtactttatgaagaagcaagaatggatacaattggtcatatccatcatccaaagattcaaggacttgggacatttctcttctgaggaagtaaagctggatgtacagcaacaagcttgaactctgcgactctggccctttgcccagtgctccttccactccatcagtctgcagctctgattactcttgagacatttgccaaaggagacatattttcaaatcttgtgctaattatatttttcactgaagcattaattcaggcttctatgaatattgttacctgttagtcttctgtcaaacctacttctccttccaaacttggacttaatctcattctacagtacttacagttaaaccaacactgccagggtttaatacctttgagcatttttctcagcaggcttgctgtttaatccttttaatgtcagcactacacaagcctccttattaaaagggggaaaggacattatcacaggctgcattagtggctttctttctgccagtgaaagctaccaaatggtaatctttttagctttctctttattttaatgtatgctgtctgctgacacacacacacacacacacacacacacaaatgcctacaaaacagctgagatattaaattctcttgtattttaatcatgcataataggaggataatatgtaaagtttcaaacttaaattctcttagtgccatggtttgaatatgcttggcccaaggactggcactattaggaggtgtggctttgttggagtaggtgtggccttgttggaggaagtatgtcactgtgggaatgggctttaagtccctcctcctaactgcctgaggagtcagtcttctcacgtttgtctttggaaccagacgtttgaactttcagctgttgccatgatttttgcttctttagaatgacttaaaatgagggctttgacaataacgatagttttgtgcctgtaaagcacagcctacttctagtcagttagtacactgaacaaactgtctcagatatcacctgcttcatctgaggctacttcctgtactgatataatgtgtagaacatgtttacatctaattctaattggggaaaattctataggaatgtcaacttttttatactaacccaaaagacaaatttgaaaaatgaatccaagcggttggggcagcatgctgtctgacactaacttccatttgctacatggttctgtcagtgccattttcgctgaagtcagcctttcacccagaactcttcaagggtacccccaaagagtcacaggtttcactttacatcatcccgcaatcaagcattccagtggaattcaggtcgggtttttataaacgggtgtagagtgactttttctcccagtcgtgatgtgctttaaaaagggctgtgaatatttggcataaatatgtccactagaaaaatgtatataagtaaatattatgggaaaatggcatacaaatgttttaaagttaatcttcaaaaaccttgatttatagagtttaaataggtttacatttccaaacaaatgatttgatgttttctaatatatatatatattattatgaatatgttgtcacttaaccatttgatttgtatgattttcctgatagcacatttgcttaatgtgaatctgatttttgatcatttatttattttctgtggtagtggagattaaaccagggtttggtgtatactacgcaagctgtctactgagatgagcccaactttctttagcacaaacaaatggattcaactcaaagcagagatggacaggatgctagatttttctatgaagccagaatgaattaactcctctaaatgatttctattagagcacctctatacttatgggaattccatctctgtttaggcagggaaatcattcagctcaaatttagagttttacaagggaaaaatttccagccctatttggaggagggctgagaacattctgccttcctgcggccatttgattaaatatgtaaatagatcttctttatcattagacttaccaagcaggtaaaggcagattttttttttggatgccttacagcaccttcctagcatagcactcttcccaaaaatgtgattataaaaatgcatcattttagtatgtaactataaacactgattgcacatatattataaagtcttgtaatttttaccaaggagagcacataatggagaaatcaccaatagttaagggctgatgagaaagtatttgtatgaaatgttatcagtgctttatatgtgtagatacatatatatgagtaatttgtgctcaggctattcttgaattacacaatcagccatacataaattctttggctctttcaggaaagcacactatgtaaaacagattaaggatcactgtctccaagactgatcaaaaacaagttaagtatttctcaagaatatattactgtgtgatttactatgcataaatatatgttagcccttccagtttagcaaacaaaatatgaatttctagatctagttctgtgaccattcatctttatcaacatttccaaaattaatatcattttcttttttagaataaattcatcaccttttaagtttcttctagattttgtcttaaattgcaaagagtgcacatcattattgcaacttcaaatataattatctctaaagttgaatctttacagaaatttatctttacacatatattttagtaaaatgtttactaagtatgatatgaatcttagtatgtgaaacatgaacctctccatcaacttccccatgactgaatttctatatatatatatattaaaataagagcatcagaaaataaaagattaaaatttagacgcacagcatgttaggctagctcttttcctggtgaataaaggtactcaagaccaattgattgcctgagtcccatgcccagaacttgcatggaagaaggaaagcattcactcccacatgttaatctctgacctacacatgtgccatgacacatgtcatgtgctcatatacgtataggacccctcctataatcaataaataataatcaataaataaatgtgaataaaaacctcttggttattcctatgtaaagggaaataattttgacaaatcatgcttttattataggtccttttttcgagaataataccaattattcttgtcagtctaacctatactcacagaattctttaacctctgctaattctttatttgtacttctaactatgacattgtagtaaaatagccaagtcatcaaagaagaaattaagcatttagaaaaggctgagacctataactgtgtgttagtcttccatgttgacaagtaatgtataaactcattatattatgaaataaattaaagcatactagagatgaataaacatactctttgagctgaaattggattgacaagacctagaatataaatttggctccttgggactgaggtttctgactttctaaataaagaatttcactatgtcaggacccacacattctcttttttgatatttttagtgtatgtgtaagttttttatgcttttcaggcaaaagaaatagcactttcacttattaagtagataggctcaaacttatatatggttaacaatttgaagcctaataccttagaagctatttagaactatagacatacattatacgttttgtttcatttttagtgggacattcatatatgtggtgttttgcttataatcacccaggaaacatctttgtgtttcacaatattttcctcatctttgcattttatgatagcaaattatagaaactcagccttaaaacaatattgcaagaggaatggaatagtgaaatgtaggagttcagactctctcaaattagtagtatgcatggtttccaagtgatgtcactgtgttgggcttcaaattttgaatagtcatcacagttgatctttgcttttgtcacttaggccacctcagttcagtttggaaggcaaggactatgatcctttaaaaaaaaaggagaagtgtgatgtcagtagttttgagggcaggtggtttatagctgcagaagtgaagaagaggaaaaagagtaaatattgcaaatgttgttctgcttgaaatagccttccttccactctacacccacaaaagcccattcctactgcaaggctccgctcggctgcctcagatgacctcccctagcagatcaagcacacctgtgacacattccaggacattcctcacagcatgagtcacaaatgcaattacacatttacctatgcaactacctgatgaactgttctctcttctattacaaagcaggctctattatggagcctgtctgttatcactagtgtatcatgacatctctggtttcttgtggaaattaaatatcacagtgacgaggatgttagcttaatattattttaattatttttcattctattgaatttctttatttatagtattactaaaacatactgttttcatactgagtaaagtagttgggtgttaatggactgttataaaccaattattgcatgtaaaatatcatgttacttcaacccagaaaactaaacatctttgtggatggtcacaagtgacaagttgcaggtcatgttctgcagtggtaatctgaagccttgttttgtacaaagtgtcaatagtgtcgtgtagttgtctgtaatagcccacattagagactagctttgttagcacactaactcataagtgaagtttttgctgccattactgaaatgaaatgaatttctaaaatttcactgtgaacattagactgttagtcttggctatacaaagatttattgcctaagagtggatatgaggacataaatgatatgactcataaataatattttaaccagacacagaagtatgataggaaaatagctaccattaaaaaagagatgaaaataaacaaacaaacaaacaaacaacaacccaccaagagtttagctcatttagtacaaccctttactgtggaggagctctgactttatccagtctgttctgatggactgtgttaacgtgttttacatttctggttgctatgctaagaggaaattgttcttttccactcaatgcatgttgggatagaatgatcatgtgtcccatctgttccatctatgcagaaaaggagatggaagaaaaggagacgtggagatgtttggcctgtacttctggatttgttgatcagtgtaaatggtcttctttagaaatttgttttatttaattattcattcatttattttacttatttattgccttaagtaaaaggcaactctcagcaggattatcacttcctgcatgttcatcccacagttctgagttacttttcagggacttatgcattggaaacaaaacactgatgcccacttgcctgttgtcatttccaagatcacttctaatgtacatatttctaaaatgaaattaaaatgaaatctaccaatcaaagggcatacacattcttctatagctaaggctaaatgctctttcattttatttccactgtaattttactagtctactcagtgtcacttatctatcctttctcccctaacttacatggcactcaaccccaaactattggatcacctggaagaccttaataaaggactcagtaaagacactctgtgcaagtcccccccatttaagaaaaaaaaaatcatacttaggctaataatattggtgcttagactggctttgaacttgtagactccttcctaactcagcacactatgtgccgggattgcaggcgggaaccatgaagccctatggaagctatgggggactttacaaagcaaagcccctcaagaactgctctcattattagcaagaccaccacagccctgatctcatttctgcttgggcactttctctgcttttctataagtatctattgttacttatcacctttgtcttttttttttttttctcacaaagtcaatgtcctcttcctcttttgtaaagaagtagaaaaaccccactcatcacccccattaaatcaacactacactattattaattagtaattaacaatggggccttgcaatagtcagtgaatctttgttctcttttctcggccttccttgttgttgaaataacggggccatttttcaccttccactccaccggtggacccagctcttggggtggggggtggggggatggggctcttgagctttccaggttttagtcctggcagttcttttgcagtacccacagggcatcaccacactctctttttttgtccaatagcaaacggcttctcgatcatggttccagcttctacctcacaggttgccccatttaccatctttccttagatgtcctaaatctatttcaaacctaagaagcatgaggccagctttataatttctttctggtgattcatgccattgttacccagctggaaacataattgagaaaactaacaattttaactcttaaatttgtttctaatattagcacacaaagcgatgggcttaatgaaatgtatgaattaccatgctcccattctgctggacgccccccccccattccttcccccactcctgctgctctgcttgctcccacaggatcccctcttctccttctgtgtcatgtgtattctcctgccctttctcttctcacctccaacccaagagctcctttttccactctcatgatcgctttcctagtttcaacatgtgtaaaaatcaaaatctagagcatacatctagagaaaacatggtatttgccttctgtgtctgccatgcttaacacagcagcctccagttccacttgtttacctgcaaatgccatgatttcagttttattcagagtcccataaaatgccattgtgtagacgcactacattttatttatctatccataggttgatgtgaatctagtctgggtccacttctcacttgttttgaatgaagggctatcaggtatgtgcacaggagaatagcaggtcatcttgtggatctgtttttaatttgttgagaaactctatacagagttccacagtggctgaaccagtttacaaccacccacagtgatgcgggttcttcttcctccacagcctgggcaccatttgttgtccttagttttctggctatccttttccttgctgttgtgtatcctctcttctgatctctttctcaaatctataaaacacatcagacttcatctctatctcttcatgtccagcatcacctacctgactcccaaaattcacttctctgcctctattctttggtggttaatagcgaccttccctcttcctttatcatctctgctctctcctttctctcatccccatggctgtgccattggtcttgcagctggtcgatttcatcaatttcccagcgattctctcttccatctgttttgttcctgagtaacagaatttccaccttttcccacagtgactttcccaagaaagatggaacatcatcttccaaattaagcctttaaaagctctctgttgtctgcagaatgagacccaatttcttcattaaatctttatgatttgttcctagattatctttttttttttttctttttcctcccatcagctctaccgtactactaacagaaactcaggtctctggtcatagtctcagtacctaccctccaatttctcacgctctcagcactcctgtgcttctttccttctcatcttcctgaagtctgatggaggaaacgatgttttattgtcttctgtagacatacaataaatgtgggagggaaaaggattataaaactcgtagccttcaagacaactaactttgcaggacatttttgaagttttcttcttagaatgctctccagtcgcagttatttatctaccagctcaatgtaaaatctttgtcaaaaattagatgactcaactctaggatgagctgagctctttgcctggtaaatcttgatgtctgggttacaaggaatttgcctaggcataatgtggcctcacaccccttttgaggctggaaaacaggtactgggcgaacaccaccccgcccccagaacctctgactgcaagaagtgttgggagtcactacgtcctgcgtcatcacgtgctgcgaagagggtggggccctcctgggaaccgtgaggggcggggccgagcaggtggggcggggctggagcccggggcggagctgcgcggggtcgcggctgcggaggagcgggctcgcggcgggcggcagcgtgtgtgtgcgctcccttcgacgctcggtgccccacgcgtgtcccggagaggctcagcccggagcgacccggaggacgaactggtggacggactcgggggtggctgccaggcagggttgtgagcgacgccgcggcacagcgcgggagccgggaagccctagagcactgcggcccctcctgaccctcgggaccgggcgcggctagcgtgcgggtttctcctccgcggccagctcgggcagcccgagtctcctctgtcgcccgcacctgcgcgtcgcggtcgtcccgccctcggcggcggctcacctgggcgcagcgcgggcagggcgccgcctccgggacgcaggtggagcgggcagggcgcgggcaccatgagcagcggcgccaacatcacctatgccagccgcaagcggcgcaagccggtgcagaaaacgtgagtgacggcgggcaggcgcgctccgagggtgcgggaggtccccacgcgtgccgccatccaggagctgagtctcaaccaatgcgttaaaaaaaaaaaaatcctgctttcaggcacctgcacctttactgctcggcgaccttccctggctggttcgttgacagctctgacctacctagtgccgctctagcttagttagttaagcttgcctggaaatcctccactctagatctccctgccgtgagctttaggggacacggaggataagtagacagctcactgaggtgagatgttgggcagagctaaacacgtgttgtcttgaaggaggggacctgtgcctttgaaggaatgtctttctgttcttagcgcctagctttctgttttgctctctcatttacttcctaagcagcagttctgcagggctcggtgtaggcgcagaattgatagcaggttggagtgtgcagtggacaggtgccctggcagcttggtggcattcttagccactctttggtgcagttttcttcctccttttggagtgcttttgggtctgtaaaattttaaatcattaagaagaggaaaaagaactagactgacttctaagttatttctactctctacctgtagttcatttccccttgctttttttttttttttttttttttttttttttttttttttgccaattctgacagagattacaggctttggtctttatttccatgggctatttgtatgagatgggagattttttttcccccctcagaaaagagattcatgattgagacagggttccatttaggagttgtctgtattgatgcattcattcataattaccttggagtttccacatctcaccatttgttatttttttaaaaaaataaattattttaggaacactttcaggcaatcagtagtgtgtgttttgcttgaaacatgacagctatcaccaagtgaaccaaaaaaagaaaacaaaaacaacaaaaaaaccaacttaagatttatacactgtttacaaatagttactagcttagaagttgggttatttgtggattttaattccccttaagaatttcaactgtcctagttcctcaaatcttgacttacaaattaatattgagaggagatgtccatgtgtaaatagtttgatcagaatttggaagttttatggttggtacactttaaaggacgcaaatgtcgttgactcagcagttttctaccccggcagttctttggaccctggctttcagtgctttagtattttgtaggacggtttctttttgttaaaacatgtttgctcaatttgactttgttcctggcagttacagtttccgaggctttcaagtgcttgttccctgttttcattaatagtaatactaactcagtatgagatgaaaaatctcaggtattatgtacatgggcataaaacttggagctccgcttgagtgtctaagtctaagtaactgattttccttatgttatttaaggacataaactgctttctatacaaaggtcaccatcttaaatgttattcattataacggcgagtgctcttagtttctagttaatatagagagcttcctttttaacacgacaacacttccttttagattaagttacaccttttattatattgtctcactatttgcatttgataatttcggacaactaaactgttgtccccacgaacttatattttattttatttggtccttgacttctgtttatcagatctgtactgaacacctttaatcatctctgagccttcaaatgccttaaaggtcaccagcttgctttgttgaagactttagtgctggcacttaggtcctttagtgaaagtacttacgttgttcccccctgaacagaaaatagtgagctgtataatcacataatcaaagttcacccttaacaaccaggtcaccaagctttagtatgagtctttaagttaaactacttagcctgtgtgcaatgaggccccaaatacctcaatttcaggaaaaaacacaagtgttgactgtgctttctaatttaattaacttgtaccctttaaggtatagctgttttatacggagcatacccattgtaattctagtgtcgaaaaatgtcatatttaaatatacagttccgtgaaaatttggagtaaagtgggtgacatgattttaacccgaagttctttcagtcttcaaatgaggatctagatgcaaaataagccccctctagtggccggtcccaccatgacagttatctgtagaaggaaatcagtttgaaatgtgttcaattccatccaaggacagtgttttgtatacactacactgtgaatagctgtttcctcctccttcagtgcaatgaaagttaggaaattaagagatcctaagcagccttgcatctagcccatatcctcatcttcaaaggcagaatgtcaaagaccaacctgggaatagaatcttctgggatgtgtctgtttccacttaaatcctgttcttgcttattctctttggagaggaaaatgttgtgtgcagttgtttagttattcagtctcatgaagatggctgagcaaagcagaagatggaacaatctactctggtgattaaaacttgaaatatattttgaagctttattaagacagaaaaggtcttacttactgctactggtagtttaggattgctagcaaacagcagatgctcaatcaataaaacctgcagctgtggtggtattcaagccagctgtagcaaggctctcatgatctgctgctaagtacacaccaatatcaatttttaccttgttagtattcaggaatgctgaagtaatatagaagcccttcactctattaaaacgttgtgagccccatctgtataacaaaactttactaatcattttgttacagtacacaatactaaattttccgcagatctacagtatggggccctttgctagacagcacctgacattaaaggactttgcagataccgtagtatttttcattttctctcagatagcaatagtgagagggcatctatgccgaggctgtggatgtgcctcatgctcacccatggatgtgtctaacacaagggctcacatcaaactgaacgaaagaagcaacagattcaaactaaagggtgaggcctagtttctgttactgttgtttttctgtattaaaattctttttttcatacaatatattttgaccgtattctttctcctccttcaactcctcctaggccctcccttcttctctccccacaccatttcctgttctttctctctccctttcctggtcaagtttttgttttgttttattttgttttgttttttgtttttactagcaggacagtctcctccactgctgttcttacaactaaactaggaaagcagaaggtcgagtaaacccgaaggctgctggagacccagtggaggcctagtctttaactactgctggttatatgttgcaggcgtgacatacagacactgccggatcttattttccccagcagtgaccagtacagtctccttcctgtgtttagttaacaccattacttagaagtgagcactatgcaggtctttaacagtattctacttctaaactctttaaaaactgtttctttggcagtgtcatatagcaaaatttgctcttattccccaatatatactgataggatcattgaacacagaattttccatacatagtttagtctcctttctgtaatagtactatggaaataatgttatcatttctggctcaggccactgggacctaaggttcacattcaaagttgattcaggtaataagtggaaaactggactttggttattgcatctctagttgttggctctaaagccttatgttcttaactacagtgcaggactgtctagatgaacaggttaatcagagtgcatgatggcccctgtcctgggcattgccacttgtccactgcaccttctttaatgacactgaggctgaaacagttgactgccatttcaggactcagtctgtgccagcccatctcctgcttttgtattcatgtcttttttcttagagtccctccagcccccatttccctgcactcatctccctgtgaagcactttgaacaactgcatgttgttctgttgactaactccagtattttcctttcgagggcacattctgtcacttctagcatttctgcaatttacctggtgtttcagagaatagtctggaggtctgtaaactcttatataaatgtgtcatttccataggacagacctctttaggtggaatttggggggacaagggtttatatacttctaaggatgagccgaatgttacagtcagatatagtgtcaaattagattataaatttttttttttgtgaattacattcacattgtttgtcaaagagacatgtctgtatccacgtattttacttaaaaatattaccaagtgatgggggtggttgagctggtatgttgtgactgtgtttgtgtgcagtagtaggattttatgctgcctgtattgacttacgttgtctaatacttttcagcttcttagtttgttctttctcttgttcggaattaaattcctgtaaactgtgtacacattttaaaagtcagtgccacacagtacctgccaccttgcccacagtgtgctgggcattgtctttggtgcgtcctgtgaggaagtcaactttccatctctcccgggtttgcttcatctcttcctggcctcagagctttaggttaaatatgctttcagcctttcattgtttttgactatgtcaatgtctttgctgccgagctaagtaatattctgtgattgtatttccctgccactgaaatatatcggtaatttacaccattttccatcttaattgtctttttcatgtgggtacagtgtcttaggtgtgtgaaagacaggatttctgccgttgtgtttccctttatttctgaaggaggggtagctgcagaaagtattgtattctgtcatcatgaatccagaatgtcttgcttctgtttaacacctgcgtctctaggaacacttgctaaaccacctacatcactgagcagcgtattatacttgcttgcctccctatagaataggtttggtcctggtaagagaatcagaactgctgcatttgtttttgcagggaccagagcttcctgcatagtaagtatttgaggtttactaagttaccagttggttatcatttaacattttcccagtcttctgttggtaagtgtggtatagtggatctcttctgtgagctcaaagagtaggactgaaaaagaacatgcttctgcttaagaaataggaagatgaaacattcaccctaatcttttcatcaccgcagaatcattatttctagacctatttaattttcctggctttttaaatacgtggttcttgtgtgagcacctgctgtttacacataaatctctccttgacgaaagccaacaggacagtaaagagtccatcacagccagagagcagcaacaggacactggcaagagagtctgactcggtgggggcttccaggtagacgtctcagacggttctgtgatgctttttgtctcatctagggagttagaacgtcaagctgaacttagcttggcagtgagattcatctttatgccatgtatcacccttattatttcaaatcaagcgcgtagtttatgatgagtagcatttgaaattctcattcagagatcaatgcccttgcaccagagctgggggaacaaatggaattaagagttgggtgaattctctgttctcttcatcttgaaattattcccccaccgtgtgtgtgtgtgtgtgtgtgtgtgtgtgtgtgtgtgtgtaagtgtgcacatggattgtacgtgtatgcaaatgcactcggaggccagagtcaagtcttcttcacttgcttccccttttaaaaaaacaaaacaaaaaaaaccccaaaaagtaatgttttaattctttgagaatttgatacagtgtattttgatcatattcattccttctccaaccccctccaggtcctccccacctccaccctcccaacacccctcgtccctccccctctctgtatgtatgtgtgtgcttgcgtattcaattttaatatctgttctttacatcccaaccacattttcctccacctccactcctcccagcccctccccacacctctcttccctagacccattcctccatttcccttccaagaaaaaaagaaaaatcaggcctcccatggatctcaacccagcatggcataagaaattgcaataaggctaggcacaaaccctcattcatatcaagtctgaacaagacggcccagtaggaagaaaaggatcccaagtgcagacaaaagagtcagagacaccccttactcccttgttaggagtcccctgagaacagcaagctacacaaccataaagtatatgcagaggtcctagctcagacccatatagggtctgtggttgttgtttcagcctctgagagcccctgtgagtccttaattgattctgtggtcagtgttctcatggtgtctttgacccctctggctcctacaatcctcccagttttcttcagggttgccctggcttcacctagtgtttggctcatctagcttttttggccaagactcctgggtgtgtgtctttccattgtagaaaacttgattttctttctcccagcagcaatcaagtaacaatagcatctcggggtagaggtaggatttcatgttgtcctctcctccctgctaggcctttgtctggcttgctctttcataggacttgtgcatgttgtcgcactctctgtgggttgatatgtcctctgtcctgttatgtctgaagtcatccactgcctttggctctcaggatatgtctgtcccttctttcacatagatccctgagccgtgaggggaaggtggtgttgtaaacatcccaactagggtcgagcacactccttcctctccttcttcttgctgcacgtttgccacttgtgggtgtgtccgttcttggctatctcctacaaaaaggagcttctgtggcgagagttgagcaacgcacttatcagtgggtggagcaataagtcattaggagtcattttattgctgtgtccatttaagagcataatagcaataggttttcccctgggatcctatctagccacaggttcttgggctcgatcttgtgtcaggaacaggccatctcatagagcaggtctgaaatccaatccagaagagattatcagtggttctgtattgaggtcataaaagtaactgtgataacagcgtagttaatcttacttagtctgcgtgagaagactaactcaaatctttaaggggaattaaggaagtggaaatttgagaatctgtgcttacctgcaatatgtaaatgattaactaggtaagtcactcagcattacactttctaaagccaaatgcatgcttactagtagtttttctaggtaaaatttgctttaaaatcgtttttttttttaacttaaaggctctttcagtatgaaaatacctatttttttttttttttttggacagctcagtggttttagtatatttttgcatgaatgctatggatttcttggtattttttggcagtgtttggtattatctgatagttatttcatagttgtgctggtgagaaaaagaaaagttgggtagcagtatagtagaggggtttattgagaattacttcatgtttcgtcggtagagcggtccctgaggggacgttttaatgttagacacttttgctctgttttctaaaggttttccttattctttgtttttcagagtaaagcccatccccgctgaaggaattaagtcaaatccttctaagcgacacagagaccggctgaacacagagttagaccgcctggccagcctgctgcccttcccgcaagatgttattaataagctggacaaactctctgttcttaggctcagcgtcagctacctgagggccaagagcttctttgatggtatgtcagggtgactgacttttacagtaactcacagaatactaaagttaaatgtggtcctttaaatgttggtgacaagacaaaaaaaaaaaaaaaaaactatccatgagtgcaaatgttgtatttattgtcgtagaaaataatgaaccaacaaagctaaatgtgtaactgttactaactttcctgtttcattgatggacaatggagctgtttggatggtacatgctatcattctttgaaagtcatgtatttagaaattatactcaggtttcatttttacaaagaaataataaagtactttaagactgattggggctaggactggggctggctcagtggacgagagaggatttggtgtgtaaacaatgcagatctgcgttcaaatctccaatacccacttaatgtgttgccttgcatgactttaaccttagcactgtggggaacagagacaggactctaggcctgctggctgccagcttatttgcaggttcagtgggaataaggcaagagtgatagggaagggtacacaaagtcttcctgtggcctctgcatgtaggcatgtgtgcatgcaggcatgtgcacttgtacccttctctctctctctctctctctctctctctctctctcactcatgcacacaaacacacacatatgctttctctgacacacatatatacttttctctctccttctttgcctctctttgtctctttctctctcacacatacatacacatacttcatctccctctgatgcacacacactctttctgtgacacacacacacacacacactctctgtcacacatgcacacacacaaacacccactttctttgacattctttccctctccccatttctatctctctttgacacatacaaattaatatacacctttctctcctccccacatacacacacaggagatagtaatctattattcctatattttctgtatatttattcatttagcctttcaaagttatatagacttcgacagctttaaattaatgtatgttagcgtcaagaaaatgtagtcaaaatggtttatggtcagaaagaacacttaactatggaatcaacagtgttgggtttcattctccacagtgccactggccagctccttgactttaactgtgccagggagccccctgtgctttaccgtgcactcagctgtgagggtggcagtgcggcctgcatggttcagtgttgtctgttacatgtcagtcatccagcacttcatcaccacagtaatttcaaaatggaattcctgtttgaaattaatcttctaacataatttatcttgcatagtaattccttaattatcttttacatgcattctagggatttgaactttagacaccatgctgaaatagcaaggaatctttcttgctaagccatttcccaaggccttattttttctttttatgttcataaaaattgatttattaaggcatgtgctatttaagggatcatattctttcacgaattatagtgaatggattaatagcaagacctcaaactgttgtgcgcttatatgtcactaggcatcacaatgagatgcagaagtctccccttctgcaagctcagatgacactaaaaatggccatccaggtcaccaggcagcacctcctcgtatctgtaatgtttctcagaggactgcaaagaccgtcatcccccttcagatgtgtgtttatatgatttaatgtctttgatttgagcaacttttgcttgcacagttgtgtattttcttaacaagtgtaatttttttttacaaaagcgttctgtcagtgcccacagacacctagaacagcgatttcatgtggtctgaagtgcacatcagatctcacagcagtgatatcattcagtctgtagtgtacactgagccctatagtggccattccagtggtttagagtggacactgagttctacagtagtgattccgtgtggtttgtagcgtacagagtctgacaatagtgattccatgtggtctatagtgaacacctactcatacggtagtgattccatgtgatctacagtgtacagcgactcttacagtagtgattccacatggcctgtagtatacagtgactcccacagtagtgattccatgtggccagtaatttacgtagttctatagtaatgattccttgtgatctatagtgtacaccaactcctacagtggtgattccatatggtctgtagtgtacagagtctgaccacagtgattccacgtggtctagtaatgtagagtcctacagtggtgggatcatgcttagtttcatagaagacacttaacagtccgtttaaaaagattcctccctttcagttccatcgcactgagcccttcactctgtgtcactgtgcacaccactgctgtgcctgggtgtcctgctagagcctcatcctgggagagctatcgctgagcccaggtttctggattccttttattgtttctaactctatctctatccctccatctctgcaaagtcctaggacttgctgtgtgctgggatgaaggcctgtcccaccaccaccaccaccaccaccaccaccaccaccaccaccaccaccaccgcccatagtctccggacaagcagcttcagcactaatgggggcttgttaaagatactggccccgtaggaactttccctgtgagccactgctgtggactgtaaccttgagctcctgccaacttcatagcctgaacctggctcataggttgtgattcctgctgcaccagatccacttcactcttccctgatacaggaggtatctctgcccttagagaatttcatgtacaggggcttcaggctcaactctgggagagtttattgacttgaatcatcgtacatttcagtgcttgtgcctttacgatgaatgttgatttgtttgtgtgtatgcaaaataaagtttatgatgtttgagaaagtacatgcattgtcccctgtttagaggcaggaggatggcactgaatctgcttagaataaccatacgcgttgccatacaagcactacataattgctatctttaaaacagatgcatatatgtaggttcacacacatgcatgatggacatgtgtcttgtttcccccaagtcagcctcattagcagtgccaggcacattaaaagtgttttcttagcccttcattaactagttagatttttattcaggtttactacttatttatattattcctcatcaattacatcatgcttacttttaggctactttgctggttttacacttccgtgtacataagacctagctggaaactttgttgagccttctagagcaggcctcgtctatgccgattcagtcacttctctagaaaaccaaggaatcggtatttgagcaaatatgttaacaagcatgtgacagagtcttagtttgggttccattgtgcccagagcgaatttttaaaggttgttttctatgctcttgaaaggaaaaatcccaacatacaaaatgctaaggaaggttttgtttgtgtgtgtgtgtgtgtgtgtgtgtgtgtgtgtgtgtgtagtttaaggatgtttatacactttgaacagtagctcaagctgttcaatatatggacatagggtttaatggaaagtgtgtgtgttgggggtaaaagccagctaaaacccaaatgaccacatgtcttctaaggaccatccatggcccctgcagtgtgtccgaggacctagaagaaaatgtcaggagcatagtacctttacgaacagaactgtggtgtgcaacccaggggacatgatagagctcccggctgtcctgaggggcctatccacactcagcctcaccatcctgctatcagggaaacagtgtagtgaagcgaagggaagctccaaatgaataacaggatgcaaacagggggtgtgtaaattcctgcggaaagaacaatataaacgagtaatcatacaatcttgctagaaaggaaactcaagttttactataacaatagatatttttccaagaaaatacatctatttattgcaagttcaaataatacggcatgaatcgatcttcttacagttgaactgtccgaaaagcagcagttgaatgttaggtacaacattaatatttatacttttctagttaattgagacatccctgaatttaacttttaagtacttaatacctcttactcgtgttttaggtagtgtgaggtttgaagccgtctctttgaaactatttgagtctattatgtccaatgcagaaagtattcaagaagttcaatgactatgatcagtagaactttatttatgaatacatggattttggtggctgtatccaggtcttagaattggcttatgttaacacaaaggccatttctcctgtatcatgtctgttgaacaatgatcaagcaggagctactgcctcacatgggataaaaagatcaaccacaggattttcgttagttagttagtttttttcaagacgtggtttctcttggtagtcttgctgtcctagaaattactttgtacaccagactagacttgaactcagagatctgcctctgccttttgagtgctgggattagaggtattcactaccatggtcagctaataatttattcttaagaagtgtaattttgatgtctatattttgaatgaggttttcttactacttattgaaattttcaggatgtaaatagtttgttcaaactgctctacatttggatgttgtcctagttaggcttattgtctatgtgatgaaacaccatttccaaggccaacgtataaaagaaagcgtttaactgggagatttcttactttcagagggtgagctatgatggagaagactgaagaaggcagtaatggagagcccacatctgatctataggttgtggtcagagaaagagcaagtctgggcctggttgggcttttgaaacccccaggcccacttttagtgacactgctacttcaataaggcccaccccctaatgtttctcaaacagctccactaacaggagatggagcactcaaatatggggcccattctcattcaaaccatatcattctactccctggctcccataggcttgtagccatagcataatacaaagtgcattcagtgtaacttcaaaagtccccatggtttttcacaatctcaaaagtctgtttaaaagtccaaagtctcttctgaatattccatcagttcctgggttcgtaatgtctccttcccatgtcatggagactgtacacggcagaggacatgtgccttaagatgggggtgaacaggcaggtgaggcacatgtcagtcaggtaaggcccacctcccggtatgccaatctgactttgagaggatgtttaaccattctgtgtcacacggccgttacctcttctgtgtgaaccaggcgtgcctgttctgaggtctgaagtggcttaatgctgacagtaagagctctgtgaatggattctataattacagttgttgtcatgtgaattacgcatatgtcctatagaatactgacatttgttttaacagagaacgccttgtgactgttgcctagggacccttagacccaatgttaatatcacctatgaactcgtgtgtaggagtgatgctacagtttaactcagatgggaattgctaacgagctcatacgagctcttagtggagtggatggtcattcttgcctatgacattttcccttgttagaaacggcacattgctcaagtctagatgttctccagaatgagagctgttgcttgtttggggagggtgctagccatggacacagtgtgttgtttgcacactcaccctgtgtgtcagttttaatggtgtgctgcagtttttgtcttggtaaaattgttaagagttatctcttaatgtcatactagtaaatgtatgtactaagcctacaataaacttagaaaatctagcaagctaggagatttctaaattatttcctaagtctagatcctctgccattggtcttcagagagaggcgtatgatttgtagtgttgcctgggattgttggtgtgacgcatggagtgtgtcatcttagggccatggagtcagcagttgacagggcccaatctgtgagataacatgccttccggatgattctaatgtctggggaagtttcatagtaactggtataatgtattagtcacattctgcatttcaagttatgcttgaacttcactcttgttgggtcaaggtaacaacatgcctcaggctgttaacagccccgccaaaggccgcacacaaacagacatttctactcttgttgtgttaatgcatagaagtactgcatctgaccaaaggcataatatggagtgtgataacaaggtctttggaagtgagttttcacttgaaatttggaatagaactaacttttaaggcctttgcactttaaaaatgatctgctaaaaacaataaccttccaatagtcacaacacaagcacaattccccccttgcctccaagaaacacacttcagggcagcagaggaggctcagtggctaggagcacttactgctttctggaagacccaggtttgattcccagtacccatatgagggctcacaagtgtctctggggatccaatgccctcttctgagaggactagcatccatgtggtacatagacatacatgcaggaaaagcacacttacacacaataatacattttaaaaagaatacatgtcatatgcagaagaaaaccttacagtgtgttaaagtaaaatgtatcttgtttctcaatctatatagaaaacttcctttagggacatataatttggaaatttattcattcatataaactgatttggagttatttttgttaaattaataaaaaccgtgtttcttaagccattctattatacacacacacacacacacacacacatatatatgtttatgtgttttgtcaaattagctaagtcattcttatgtgtacaccagtgttatcaaggaatttaactttcttgtcataataattaatgataggaagtaataaatgttataaaatacattaaattaatagcagtggttaagaataaataatttcttctcaaaatgtatcatgccacatttcaacttacaagtaaacttagaagaacaaagaacaagatgtactttaccagaaccccatattttgtcctcatgaattttatttcttcaacaattaaaaataatatacaagagaggaaagtccacgttagaaaacgtaaatttagtgactgtcagttgagttcagaccggagccatgggtgctggggcatggctacttgacagtgctatacatttacccatggagtaaagccagttctttccactataggattgcttcagcggccttcagaggaacaaaggcatccttaacaccatggcattgtactatccttatcttgggcgacttttagattcctgtccctttagaagggggtatgtagcctactgcacggatgtccattacagcttaacagatgcttctcaggtagcagaatcagtatattttcagatcttacatttcatttctacgaactgtcacatggtccagggctgttaagtttccattatcatagagattggattatatacgtgatgtgtgaagtgcctcttgatgtttgaactattttaggcaccatctggtcatcttagtaattctattggatgcgcatcagtgctctccatttaaaggtgagggaatggttagcacccagtgcagtttatgaggttttttgtagtgcttccaggacatgtgacaagaaagagtttatcacgtctgccctttactgctcgtgtgtaagctgcattttattttatactcaccacaattcatctcaagtgacagcattcctcttacgtagaggcaagaaaactagaggtgagaatggttagctcagtgcaagaattgtgggatagataggtgggtcgtccctgcacactgggagcacatccctgcacactgggagcacatccctgcacacttggaacgcatccctgcacagtgggagcacatccctgcacacttggaacacatccctccacactgggagcaagctccaggctgcctggctttacctcttaaattttgacagctctgatggagtttcttcatctcctatgtcttagtttcgtagtatatcaaacaaacaataccagtgccataagattgttttggaaattaaagggacttagattgtagtcccaagacaatgtcattaccgagtgagtagagacattctaaaggtaggaagcagtggaattattcagtagatttcttaacaagttaagcaacctacgtgagaagagagagtattagtacagagactcgcattatacgaagggagtgtaatagttatgatactaaaacttcaagggaaaacattgtaaaaggttaaaatgattcggtcaggcttgaaaagtgcgagcataatgtaagctttccgagacagcagaggcatgttttgtagggggaccctgggaatggagagcacatactatttctggactcatatttgtgcagtatttaccttagtgcttccctatggactaaacaacagaaatagtgtctggtttgcttgcagtggatcccatccagtgaccattcccaggaacccatttatcgtgcatgtcaagtgctgggcttccgacgacgacgaaaactctgagttattccttcggaggagcttgctcttacgttcaccatctccacactttccgaaatgccttttaaacctgccctgagtcttggttcctttttgacattctcttctagcactttatttctagagcttgcaaatcctcctgaaagactggctaagtccaattgcattggttactaatctcaatacaagcccagtagcaaacaggacaaatacctttggtttctcattagccgtacaaacataaaccaagtatctagatgctgagctattgttttcttttattggtactgacatgaattccatcatccaaagattaatgtgaagagatttcagatgataattgaggtctttttttcctgacaccgtattggtctagttttagaccgctactgctccctttataagaatgtacaggcttgagtttggctttgttcccatcttttcaacagtggatcttacttggtaaagctcaaatcttctctgcttggtgaggtagcagagtccttattttcctttggcattataagcagccagtgccttacagcaagctttcctatcaaagcaagcagcgacactagctaagaatgtacagaaaggaagaaaaggccattctctgttctgcatttcagtgagaaacatttaagtatttccttttagtcttgattaataggagaccagtttacccccacactattttttggcctgaggaagtctgttctgtggccttttgaaaattttacacacagaggccaaatcctggcctcttttctcagagaaatatctttcagcttctgcaaaggtaggcgagagcttggcccaaggttctggtatgacatataaggtgatgatttgccagaaaatgcaaacacaagaatgactcacgtgacccctagcttgctcagaaagctttccctgaaccaggggaacatagaaatctaataaaataattctcgaggactgtagagtcactatttaaatatcacagggtagcaagggatcagggaagataagaatgcgaagcatttagcagattattctttctaataaggcaatccttaaactctggtaaacactctaattagagcaactgtttattgaactgctggtctgctgtgtcaggaactgcatgggcattttcattattcttcacaacagctttgcaggacggtctcactttgtgtgtttgttttgatcgcccttttgcattatcagtaaacaggctcaaggagttgatatgtctagtaaatggcagaactaagatttgtacctaaccaggtcagctatgttagccatgtgctttcaagtgagatttgttagtgcatgataaaatgctgagctaagtggtagccataaccactgtgttcggttgtgttgcctctcgccaatcatgcgacgtgcgtggtgtttcgaatcatctatttgatggtttctgttatagtctttgaatagtgcttgtttgaatatgtgccttttgtgtaattacttctcccttttccttccccctatagttgcattaaagtccacccctgctgacagaaatggaggccaggaccagtgtagagcacaaatcagagactggcaggatttgcaagaaggagagttcttgttacaggtaactctagtgccctcagggaggacaggagcacacagaaggaggagatgcagctatgctaatctctctaagtcgctgaagtctctctgtgccacgttcatgtcagctgcagcactggtcttctctagttcctggcagatgggattagaagaagtggattaatctggtctgatcatcctgggataatgggaactggattaatcaggtctagtcatcctccctgttgtttctcttgatgaatctgtgtgcgctttcaaaacaatgttgctcatgtagagacttaaagcatgtactcaatgtgcaaagactgtttttacttgaattttatttttaatgtgtaatattataacttgcatttcatttgagcaacaatgcatgacttacatgttatagttttttttcccccagcaaccatagaccttcattttgtgctttagaatgagggagtttctagtaggtttgatggtggataggttcttaaaattttgaactgtgtcttcttagagtacatactatgcttggctctcatagcatcagcagatagttactgattgtatccaactaaaacaggagtgagtgggcatgatggtggcaaagcagttccctgattgcctgcagctctggccagtgaagtgaggggagctgtatcaggtccttcctattgctgtcataagacaccatgactaagcgggacttgcagaagggagcttgtacttgggcttacagtactggggggttagaatccaacatggtagggaagaatggcagcaagcagcagacacagcaacagaagcagcaagctgagagctcacagcttcacacggaagcaccaaatgcctgcacacacacacacaaacacacacacacacagaagggggtggggagagaatgaactggaaatagggtgagactctataatctcagagtgaccatataatcccctagtgactgacttcctccagcaaggccgcacctcaaacagctccaccaaattgagaccaagtgttcaaatgcccaagactaagggtgcagttcccattcaggtaccacactcaactggcaatctgcacacagctagaggatctggcgtttgccctgctgggttccaggcttgctagggtccaatatttcttccctgtgctccagtcctcccttttgaaatggtcatgtatattctgtgctgttgtatgttggaagtgtgtaacttgccttttggttttatagggggttataataaagagattaccttgagtctctggggagacgttggacaatttgagtggggacttgtaagagctttttgattcaaagtttcaggcaatggacagttgacatgagcacatatacttttgttatccaagaggaagataaaccttttattcacactgaccttgaaaaaaaaacattaacaaaatagaaaaagaagaactcatgaagtaaaagaaggaatgaacacaaaataatcataatgataatacaggcttgagggagaaggggtagagtgtggctcaaacgaatagaaataaggagaaggtataagacaatgcatttccatgtgaatgttatattttatgtgcattgtacttaccaataaaagttttaatatctttataattcagtcaatgctggaggtattgtggggtggaaacagttctatcttctgactggctttctccaattaaaggtccaacaagtgggtttttccttctgtgcttcctaaagaaaggcatgtaaccatcatcaatgttttctgggcagtttattttatatcaaaaaatttagatgcagtgtatttcaaagaaacctggaatagaaggaaaatggaaagcctgatattctattcatatacctgcttagactttagatttagctgtaagtttttgctcagtcaagtcggaggcatgagtagactcacggtagtccatatgtaatgtgctgtgtttgaggtgcgtaagaattgtagtcattttgaagagcaggtgttgagagataaagagaaacagcctgttacctacctaactgtcaggatttctgagtgacagtttccacctctaacgccaccttcctgtctgcaggcgctgaatggctttgtgctggttgtcacagcagatgccttggtcttctatgcttcctccactatccaagattacctgggctttcagcaggtacatgcattccccttccatcatctcaaacgaaggtttttagaaaatggactctttactgcttgatctgtttttatagtgtaaggtcaaatgggtgctgtaagaattttaggttcttgatttttttttctttcagatttgagaacatgcattttgctatattgctttgcagttattgttcttcttttgaatttatcagtaatctcataaggaacttttagcgacctgcagatatagctctgtgctatctatagtatctgctatgctgggttaagtctttagtctgacagaacagggccagggagagaaactctgaggatggtcaggttttgaagcagacagaacatttgccatgagatagcatgggctacaaaggacgtaaaacagttatgaaactaaggagaggctgtgcagccatggcacatgtaaaataccatggttaatatgtttagttctgctgcctttacactatgagtattaccttgaaagaagtgttccgatgctgagcttaaagcatgcagagtgcatagacggttgatgagggagcctagggaggatagaagtgccatgagcaatagacaagaaagccctggaagactgggtgtttgctgtagggggagtcctgagtaggtggtgtggatgatggtcagccatggaagcgtcactaagacagagcattgggagaactgtgaaaccacggtcacatttagggacaggaacatctgataccatctgggaacacaccagaagtacacctggatgcttgctgttcttctgtatctgattctcacattttaacatcagaagcatcacctgaaacacttgatacaatgtctgcactccattcccagatactccatggcagtgggtcatactgcggcccgtgagttagcatttctccaaactcacaaggctccgccgggtctacatactacagaccatttacgtcatttgtagttttcattatatatacagaaaatattcactggtacctctcattagggagaaaatagatgctttagctatattacagatcaccctggcaactatgtaactgatacaccaaggtgatttaatagtacagtaagtttctagagagactaacataacagaaggccactaaagcaatgggatgtggccagtgtcacaggagctaaatcttagtgttctttgtttaaagcattgtatcgcctgtaaagggattcatggatgagatagggtttagaacagtggctccctacctttctaatgctatgatcctttaatacagttcttcatgttgtggtgacccagtcataaactttcttgttgctacttcataactaattttgctactgtaatgaattgttatataaatatctaatatgtgaccccctcccaaaggggctgcaagccacaggttgagaaccactgttctagaatattatcagctggtgtgaaataagcaaggactctgagtagatcttaatatggtacatttgagaaataggaagctgccttgtgagccagagccgttgtgtcaggaggcgatggctgatgtgaatggttagggggtctttgcaaccatcatttgcattcagttcatcattgccgacaggtgcccactgatctagacaccttttgaaactgctttaagaaaccttatcactcttcaaatcactataagtttttcctcatgcccctttcctttagtctgatgtcatccatcagagcgtatatgagctcatccatacagaagaccgggcggaattccagcgccagcttcactgggctctaaacccagactctgcacaaggagtggacggtaaggaagtttaccagaagaggatgctcatgcttgccgaatattctatgaaagaaaggcatagagctccatgctgaagataggggacaagtcaggcgggtgtgagtctgcagctgaagatcagagccagaccacaagaggatgttgagccaaggcagctgtagcagatgcaagccatagaggatgtcataaagagggttgtattgttagtaatgtgactatgtgttggtgcccacctgtggttacatgtgtggaggccagaggtcacaacctcagatgtcattttttgcaaaccttccgccttattttttgaaacaagagttttccctggccaggagatcaccaagaagggtaggctgctgggagcccagggattccactgtccctctcagcgctgggattccaagcaagcatctccatgcttggcttttcttgacaaggtttctaaggatcaaactcagtgtcatacttgcatggcacattacctattgagctatgacccaagcccaaagcagtactgttgtgttttcttttgtttctttctttgtttctttgtttttaaaccaacactggtaccattgggaaagatgggaggaatatacaggcttgcaactgaagagtgtaaatcattcttattaaaatatccccataagaatatacactagcacatgcaagaatcaagacagtcttcctgatgtgtgcattgttttaagatatctgtgaagccggtgagaaaacaaagccattgttagagatagagacattgttaacagcaatagctcagaattaccaatatagaaggaggcaagttctacagcatagaagtgtttatgtgtttggggcttttcaattattttcaaaatggtatttttaattcaaaatacaggtttaaagtctgtcaccactgtcacccttgatttcacagcagatgtaaggtagactgtgcttttccctcctacagaagcccatggccctccacaggcagcagtctattataccccagaccagcttcctccagagaacgcttctttcatggagaggtgcttcaggtgccggctgaggtgcctgctggataattcatctggttttctggtaaggtgcataatcttaaaatatcatgacgtaatataataaaagaaacagcccttaaaaagttaatattttaggaccagtaaattaactcaagtggtgcagtgttttccctgaagaatgggggtcatctgattttgaccctgggaacccctgtaaaagcctggtgtggtgatatgcacctatggtacagtgagggcggaatgagaggaggagtctggagaagcctgggtgcttatgcacacacatacacacacacacacataaacacacatgtgcgtgtgcacatactcacatacacacacatacacacgatgtttaccatataaacacacacacacccatatacaccacattgaatcacacccacacccacacacataagcacacaccacatataccacataaactcatattcacacacacaaaccccataaactcacacacacacgctacatataccacataaattcacatataacatacatacaactctgtctgtctgtctgtctgtctgtctgtctgtctgtctctctctctctctctctctctctctcttattttggttttgaggtctctggcagctcagagaaccctatcatttcagatgactttgtagcaattgctataacatggaatgtatactgtatactggatgttttgaaagaatttttaagacttagaattagctagccactttccaataggatgcctagcatttgggggttgtatgctttccatatgggaaaagcatagatgtatgcatgcctggaataaaatgcttatatttatggctccagagttagcatctgataggaggcgtcctgtaagaagtaaccaggaagcccccagcaagatactgagagtgactgtgatactgcagccacaggcagagaggagttaggtcttacattaagcctcacgaatcagtgcactttgttagtgtattatttctgacaattgtttttgctgatatggatttagagttgtaatctgagatggcattcccagtaccaccgcctgagactggttaatgggattaggtgggatttctgggtgtgctgggcttcttctgtcttgtgctatatcagatgtgtgtcacatagtctcttagacttgtagatcagctgagtttacgacacccatgtctaaactctctttggtctctgtcttctaaactcattctttgatctctgcattctttaaatggcctcataagtttcattttactgttttaataaaatggtatttttttcctcagtaggaaagactacggtgagctatggcatgtagatcctacatgtttgaaaatgaatatgtagtttgactttatcaccactcttttttcttaagctatgtattgagtgcttggtgtgcaaagggttgtagaaggtggaaatgtcatgtggtcctaggcacagaaatgataggccactcctgtcatgacttggggacagggtaggtcacttggcagtgcccacttccccactctatctttaaatttgtaatagactttctgtatagagaggagtgaaattaagttagtggttctgagccttgggaattttataaccacccctaccccaggtacatgatggaacctttgaaaatgaaaccattacataatgttaattttaatgacatatttttttaaggcaatgaatttccaagggaggttaaagtatcttcatggacagaacaagaaagggaaggacggagcactgcttcctccacaactggctttgtttgcaatagctactccacttcagccaccctccatcctggaaattcgaaccaaaaacttcatcttcaggaccaaacacaagctagacttcacacctattggttgtgatgccaagtaagggaactttttcactcataattcttcaagaattaatgcatcttttttattttagcagatttgtaagtgtgtgagatgtggtataggttctaatgttactactatagggtcagttaatcaattttacaaataatctgactgttttgtattatttactgcacatggtttattttacattttgtaaaaatatttttaatttttagcttcagagattagataaccatctaaagttaattagttaactaaaaagaatttatataaaagcattttaattttcccacctttttagaataaatgacagaccctgtctctaaagtacagtctgagccagccatgtttttagcttttgaattcattttacgtttaagttaactatgccagattcatttttgaccttcttaatattaatggccttattcaaagttaagaaaaaagactaaaattgaaaattagtagccataagcaagaaaatttaaaaaaaaaactaaaaggatgttttctatatactaatgtgaacattttgaatgttgtggaaatcgcataccaccagtgaatgtttcttgattattttacaatctgattcttttatttgaacagagggcagcttattctgggctatacagaagtagagctgtgcacaagaggatcggggtaccagttcatccatgctgcagacatacttcactgtgcagaatcccacatccgcagtgagttggaattcttgtgacccgcctgatatacggcacatgtattagaacatattaagctttttaaaaatcctttgattcctgtgtgtgcatgtgggggccaggagccaacctgtaggagggaattctctttgcctttgtgcgtccctaggatcaacctcagttagtcaggcttggtggcaagcacctatagccacggaggcatctcccagcactgtgatacacatttcaaagtgttgtgtgtgatgacatcatctgagaactacttggatccatcccgttggagtcatgctgccttggttaaccagttttgctttttacttctaattcctctacagctgctatgcagtaatggttacaatatgattattatgaaagtaactatgttggccagtggatttttgctcaggaagtctttaaaggcaccatgcatatatgttaatataaaatcgggaaatactaaaaatattcctcatttaacatgaatatgtttacttctcctccaagctaacctcttcttacacctgacatgctctcagtatttctcttaaccttttacatattaagccttatctaaaatggaaaagcacagactctgaggaaccatttctgtgcctttcagtgtgtttagtgtgtttaaaagttttcaagatattgtcacagctggtggttaatggaattcatatggaaatgcgtcaagatggctttttaaaagatatttgtttttatgttttaattgtgtatgtgcatttgtctgtgtgggagtttgcgagcaccagtacaggtgaacttgggtgccaggagaggacatcaggttccctgggacttgtttactggaggtagtgagtcacccagtgtgcccactgggaaacaaactcaggtcttttgcaagagcatcaagttcctgtagccagtgagcgagcctcacgttagccccacttagttgcagggatgtactgtactgtactgtactgatggagggtttggtgaccttgttgtaaatgtttacttgtagtgattaagactggagaaagtggcatgacagttttccggcttcttgcaaaacacagtcgctggaggtgggtccagtccaatgcacgcttgatttacagaaatggaagaccagattacatcatcgccactcagagaccactgacgtaagcatcagaaaaagaacatgtcctgcgtttgtgttttcataagtcttcttacacgaaagttgaaaaagaatcctaaggcaatggaacctgtaactaaaaatggaaaaattatctagaaagagcaggacaaagatgaaaaatgttgaaaaaaaaagacaaaagtgataagctttatcaagcagctaagtagatgaagctaaaaatgcccaactcatcctgcagttgaggagatgaaagacaatgtcatctcaaaaataaaaggaaaactatagcacttgtttacagtaggttcacagcaatttggaagcttttcacagattccagaaaggaatctttggtgaaatattaattgctttttaggagttaggtagagctaagcatcctgactggttttctccttccttttgactatcaagttaaccaacagaatttgttaaggagacaaactcttgacaagagtctgagcactgcactgcctgtcaggcttctatatgtggtcctgtttctagagctacgggctggtcactgccatttctagagctgctggccggtcactgccatttctagagctgctggctgtccactgctgttgccttatgggtcatcacacagccctaattgtgctatctttatattgtgaatacatgtctttttttgttgttgtttttggatacattttgttctcgttcataattgtcttggctcttctttactctttatgtttccaaatgtactttaaaactcatttatcaaagactaaatccccaacaacaacaacaacaaaaaacactgttgggattttgaagacataactctttcaagaaagaattaacatttgcacagaactgagtcattaacccaaaaccatagtgaatgtttatattacccataggggatgtatgcttcataaaaccattgattgttacagctgacagacctctgatgtcaccagtgtcttccaggcatagacatttcatttattgatttgctgttgtccatttcttttgtattccatttatgtctcctagttattattttatttaggtgtatttctattttggtatttatatgtttttcctatatagttttcgctccacttgcataacactagtcatgagaataatttagttcaaaataaaatccatgttccttgctatcaagctcagctttagtgcgttttaccttttcttccttttagaactatcttacttaaatcatgtatgatcaaactctaatgtattcagaccttcttgcctaccctgttagggatgaagaaggacgagagcatttacagaagcgaagtacgtcgctgcccttcatgtttgctaccggagaggctgtgttgtacgagatctccagccctttctctcccataatggatcccctaccaatacgcaccaaaagcaacactagcaggaaagactgggctccccagtcaaccccaagtaaggattctttccaccccagttctcttatgagtgccctcatccagcaggatgagtccatctatctatgtcctccttcaagccctgcgccgttagacagccattttctcatgggctccgtgagcaagtgcgggagttggcaagacagctttgcggccgcaggaagtgaggctgcgctgaaacatgagcaaattggccatgctcaggacgtgaaccttgcactctctggcggcccctcagagctctttccggataataaaaataatgacttgtacaacatcatgaggaaccttgggattgattttgaagatatcagaagcatgcagaacgaggagttcttcagaactgactccaccgccgctggtgaggttgacttcaaagacatcgacataacggacgaaatcctgacctacgtgcaggattccctgaacaattcaactttgatgaactccgcttgccagcagcagcctgtgactcagcacctaagctgtatgctgcaggagcgcctgcagctagagcaacagcaacagcttcagcagcccccgccgcaggctctggagccccagcagcagctgtgtcagatggtgtgcccccagcaagatctgggtccgaagcacacgcaaatcaacggcacgtttgcaagttggaaccccacccctcccgtgtctttcaactgtccccagcaggaactaaagcactatcagctcttttccagcttacaggggactgctcaggaatttccctacaaaccagaggtggacagtgtgccttacacacagaactttgctccctgtaatcagcctctgcttccagaacattccaagagtgtgcagttggacttccctggaagggattttgaaccatccctgcatcccactacttctaatttagattttgtcagttgtttacaagttcctgaaaaccaaagtcatgggataaactcacagtccgccatggtcagtcctcaggcatactatgctggggccatgtccatgtatcagtgccagccagggccacagcgcacccctgtggaccagacgcagtacagctctgaaattccaggttctcaggcattcctaagcaaggtaagggctttcgacagctgaaaaaacctcgtaggcctaagcatctccgtattacacttaaacatatcatcataacccattttagatagcaagcaacttcggaactgctttcgttatatttatggtcacgtaattaacttcattatagtttacttaaaatagtatgaataataaattaaataattttcttaaaagcaagttgatgtttagataatttaataactgttctttgttacccccctcaggaggatatcatgcttatattaataaatttctctttacaaatattagcttatttgaagatatactggtttagattgtaagaatatcttgactaacatgaagtttattaagtaactattcatgagctgtttgagtatagccatttacaagtgtggcttaaatcacagtcctggttgctttttagattgtgagtgaatctgctgtgtctgattgtatgggacttttttttttttgaatggagaatgaagatgatagttttggtcaatctttttcctgaaaatttttaggaaaaagatttcctaaaaatttttaatagttattataaagaaaatggattaaccatactttggatataatttactcataaaagaatagaatattagtatttgcctcaaagcggtgtgtctgaaggacattatagaatatagagagcatccatgtgtgcaaacctccaaggctgatccctcagatgctggaaatggccgcagagtggggctggctattgggtaataacagacagatagtgggagtaacttcggctcttctacaacatagcaggatgacagaagttcacaacagttcattgcatgattcaaaatcactagaaaaaaaggaaatcaaaggttcttcatgcaaataacagatgagtgttcacagtgaaagataattgcctgatttgcttacacactatatagatgaattgaaatgtcacattgtaacctgtacatatgagtaattgtgcggcagtgaaaaaaataacaacatttctagcctggagagatggcttggcaattaacatttgcttacccttcttgatccccagcacccacatgggagctcagaacagtccacagtttccacttccaggcacccagtgctctctctgcacccttgagcactgcatacttgtgttgcacatgcacgtgtgtgtgtgtgtgtgtgtgtgtgtgtgtgtgtgtgtgtgtgtatacatacaaacatacatcatgcaggcaaaacaactatacacataatattttattcttaatttattatttttgaaatgaaacataattgtattccttttctgtttccctttcttttctacaacctttcccatctaccatgtttgctctctttcagtttcttggcctcttttctttcattgctctgtgtgtgtgtgtgttcctaaatatttaaatacaacctgcacagtctgtatattacctgtaggacaaccctgagcagcaactcaaaagggtttttctcatgcctggtgttggggctgtagagtgaatttgaagacagtctggaaaatggtgagacacagaacaaaaggtcaagagtatagctagctcagtggttgagccgggttagcatgcacaaggcccttcactggacctccagcactacacaataagtgagtaatttgaggcaactaaagggataattttatgatttttattttaatcacagtttatttcatcaactacaccacaatgtgaagtttctgtagactataactgtaatattcgttcttcactgttttagcagttctggatacgagactggtaagaaggcaggtgtcttagttagggtgtgaggaaacagcgtgaccaaaagctctctgagaagaaagagtttaaatcactcacagttccacataacaggtcatcatcaaaagcagtagggtcaggacctcaagcagggcaggaacctggaggcagaagctcatgcagaggccatggaagagtactttctactggattgccttctatagcttgctcagcctgctttcttatagagccacacaataggctgagcctacatcaatcactaattaagaaaatgccctacaggcttgcctgcctacagccagattagtggaggcattttctcaattgaggctgtctcccctcagtgaccttagctgagtcaagttgacataaaactagccaaacaactgactccttgtcaacctgacacaaaacatttttcagacagaacctttcctttcgcatttatccccaagatagcacattaatattactaccacaatataaaacataaatgactttaaaagtcccacagtctttacaaatgtgagcacattaaaagttcaatctctttgaaataaccattctctttaaaaaattggttttgtttgtttgtttttaaaaaaagccttcagcccgtgctggggctacagtttgatcttttctcaattgagaaattcctctctgatgcaactagctaaccaagcatcttttttatttggtagcttgcagaacaatttattaaacacattttacaaataaattggattaagatcatacctgtagtgtaacattgcaagaatagcaagaagcatttaaaatccagatctgggcaaaagtgctggtgtctgaaatgctgtgtagaagttcggatagaatcagttcactgcctccaggtttttgattggttgtggaaggactgaataaccctttgacaccccatgtcacataatttcccatcaggccccaaggcagacgaagtgagatagttgtagcgttcgctgtaccatctttaaattatcttgtaggactaatgagaaaacctgatcttccaaaagaagtcagtgtgtgaacgtttcctctgtgtgatttgaatgacgaaagacttagccatgagcatcttcagtacaggactgtaaagtgaaacaacccataggtctaacggactaaaagtcgtttttaaggtgttcctcagatcctaacaagctgctgtgctgtgtttgttctcaggtgcagagtcgaggtattttcaatgaaacctattcgtccgacttgagcagcattggccacgctgctcagaccactggccatctccatcacctggcggaagcccggcctcttcccgatatcacacctggtggattcctgtagctcccatgccaggatgaaattcattcaggaacaggataccagaactgtgagggttggacatcagtacactttctccaaaacagatttcgattcttgtgtttagagaaggagtttaaaacccgtacctgagatgtagggatagatgctccctatacgatgggagagctcggacggagcacatgggaggagttcaggcacctcagagtgcacagtgtttactgtggaaaattctcgggttccctgctcagtaacttcagcaggaaaaacagggaggtatttggagctttgaacttctggattcttgttagtataccaaatacggagttacaggactaactgatttcctatattttttaacctctgtttttgtcccagaagttaaagtaaatggtttggtgcttttctcaaaagaaaatctcaatgctttccttctgcactgttaatataagtgcctcactttttttgttgttgttgttgttttctgatttttttctttttttctatctacctgtaacacaatagggtatgtattttatatgaaatattttttatcttttttgaattaatattctttctgcacaaagaaagtttcccgaatcccaacctttctatgaccccgctgtgtgtgcactactcatcctttccttcagataaagagtaattgataactcaaagtccactatttattgtgtaatatacctgcttctggccgttagatgttcctctgtgccttatgttgaaaaatttgaaaaataacatgttgcccaaattatttaattattacatactattagagagtagcacttgtattttaaccgtgttttctgagacgtgagataacgctgctgctgaaggtttcccagaaacctccacgatgagatcagaaggccaccgtagaaagtgctaaaggtgcctatgtccactacgctgcagtgaggggaggtggcgtgtgtcaagcctgttagctatattaagcagagcactcatttcactctgtctaaattatctttgaaaaactgtctgtaatcctgtttgtgatattgactttataaattccacttcttatactagtggaagctattcatttttctcatatttgaggagtgttaagatggaagatgccatgtcaggtgcaaggtgttttaatgactgaaatgaatggtgcattgtataaacataacgaacaaaataatctgtaaaatattcgcagttttcatttaagaatagttcttacctcatatgcattttttcagtgtatcttgtaaagaaatcaagtagtaaattgaagcttttacgttggcattaagataaagataaatacaatttgttcacctccataccttaagttgtttatgtgatacaccctttgctgccaatatggcaaatgtgtcactctgccaaatgcactgttctcaaacggcttaaagaaaaaatgctggtgtctgccattgtctctgttcttgcttagatatgatatatgaaggatgtggtcctggatctgtttttcatatgttatataaaaagctgatgagatcccaaactgagatgtattcaaatccagaagtggttctcaacctgtgctctgtggctcccgtgggagatagactgaccctttcacaggggtcccctaagaccattggaaaacacagatatttgcatcacaatttataacagtagggaaattacagttttaaagtagcaatgaaaataattttatggttggggtcctgagcaactgtattcaagggtcacagcattagaaaggttgagatccactgaaatgttgactcttctttttttcttttagaaaattaatgtatgtaaacatgcctttgggaaaaagatctcttctatgcattttcagtcaaaattctgaatctctaggattaagcattgaaaaacaactgtctaaaacatttcacaatttttttccagcatgaggtgtcaccaaggatttagactggtggtctgaattagtatcccacttttctatgtaaacttttcattaaaagttgtcatagaaaccattttgtcagtctcttctgcatgttaccaaatattcagttaaaaaaaagaagacaactttggacactgagagtatggtggcatttaattacacacttatcaaactgaaagtcttaaaaacaatattgtgtgttcttatctatataaaaatagctaaaacatctaagaataataaaatcacattaaactgcctatttgtttgtctgtattgccaagtgccaaatggaaagaccacttagagcaccactagactgagggattaacttctagatgaaattctaagactcttgtgtatgtctgattgaagttcttcttttctaggtgtttcttacagcacctgaacacttaaccaatatgccagtgtatcaacttttcaattgttactatgcacaagctagtttgagtatcaatagatcttaggtctacatagctccttgctgtcctttaaactgttacttgcttacatatgccatgcatagatttttgttaaagtatgatttataatgtccttaaatatcaaaggaaatgtaaacagtgatatatgataataaactaaccaccaaatataaatagtgttttcatgcaagtttttctttctgtctctatagagaaaacagagccctgtaccatcatatgatggctaggcaaaagtagtctttatagaaagaccaatacaccaagtctttcatgaaagggttacttaaattctctgtttgagctatttgatctgagcaaactcaagctgacaagtgatctgtagtccccagccactagtgtgattatgttggcagccacacaagacagtaaagttgtacagtgtaccacaccactgatgttcactcttgtgatgtgatatgtgcacatcagaacagtctacatcacatctcttactgtatatcactgaatacatgactacaatcatgtatttattctgatctctgtgcacactcagtccaatggcttccttaattacaaatgattccagtttaccacatcttaccaagactgctaacgcaagggtgttggctactccaaggaagtggctggtagttatgatttctgtcttaacactctgcagatgaccttgcttccaacttcccagtgcttctctgtaccttcatctcttcaatactaccattcctagacttcacctttcctggagtatataggaggagaggtttcaagaccttgaggtaaacacccatcttctttgtacttcacagttaaagatacttatcccctcacaccgtctcctcagccctttcagctctgcagcctccactcgcaccctcttttcatctccaatcttgttaaatcttggttctggttttggttctttatatgctcatccattctacagctcttgcctttgtgaggaataccctcaaggttgagctcactatgagtgcccttcatcacctctttgagtgtaagatacgtgacttccaaataacagcacataaagatggaaaaacgattgataaaaaattacacacttagagatgaagaaactgagaccaaagatttaaagtggcttcacatcatttgtttaggtgacctggagggaacgaagtacactgactgatacagggcagagcagctgactgtccctgcacaagtgcattgctctatcttcccattccacctgatgcatcatttagtttatctcatttacatcccatgaggtcaatttaattattccatttttataaaggactaaactatatttttaaaaagcaactgaaatcttcaaatggttatacacagaatagtttgtattttttaagaacccatgtgtatgttaatttggtggcaagggacattctgtagatgttactgtacagtccaggacctagaaatgacaagatgctatagattggatcgaaaatgtcctctatatctcttgttggaggcttggccactagcttatgatctattgagaggggatggagcctttaaataatagtataccatgggaggatactggacaccaacggtgtatcctgagaagagattttgagaccaaacccttcccctctttttctgtatttcctgagtccagtaaagtgagcaaaactcttttaccttagttccttcaaaatgtgctgggcagtaacatggccaagaaaccatggacgaaaatcatggaaaccacagcttattccttctctcttaagagaaggctgacacaggggctgccctggattactggggaggctcagtgcaatcatcgaaaagttcttgcaagaggaaggttggagagtcagaagggagggagaacagaaaggaggacagcagaaggatttgaagacactatggtgataatgcaagaagggccaagaagctagaaaagggaaggaagtaatgtcttccgatgtcttgattccagagcagcaagcatcctctagtttaggattttcaacctgtggattgtgacccctttgagggttgaaggacaatcctttcaaggaagtcatatcttgcatattaaatgcttacactatgaattcataacaataaaaatacagtcatgaagtagtaatgaaaatctggttgggggacaccacagcatgaggaactaggttaaaggactacagcatgaggaaggttgagaatttctgctctagttctattaagaagatatttgggctcttgccttcctgctccctgtctgtcctcttgcccatctccccctcccctcccccaactctccatgtgcccattgctggcctctatttctctattctccctctctctctctgactttttctgcctctactaccctcttagctcccctccccatgccctaaataaactctattctatactaaaaaaaaataatatatatatatatatatatatatatatatatatatatatatatgagatacttgtattgtcctatgccaattaatgcagtaattcattatagtagccattagaaaccagcacaaatgtttagattttaaggaatgatgcttctggagtggaaagatctccgtttgcacatctttctatacaaagtgttgttctgagcattctcccaggctgcagctcagagaacagccaggagggcttggcaccattcctatggctcctcccacctttaagtccctctggaccaagaaaaagagagtctactttatgagtgacacactggtgcctggttggctccaaacttgcctcggtgcaaggacatgtggaagagcacactgcagtcttgctttctccagatgtttgcctcatgttgggaatcaggaaatgtgtgtgttgctcacagcctcacatatgtttctaaggaagtgtcttaataatgtgtctactggttgcaaatcaccatacaaattggcctgattcctagaagaaaaacggctttcctgaagtgggctagacattatacccgcactgctgtgtatacattatcaagtagttcttttcattaaaattaacacacctattttgagggtagaaagagtacttttttcaaacttctctcaggatattatcactttatagggttcaagggaagcccattaaatgagaaaaagccacaaagctgttaaaatactgtccattacaaacaccttgcctgatatttgtgcagcgccttctgtgcacagagttttcaactcatattggatctagtgtgattattatacaatacggagagttgattgtcctgcggtttttctatttagtgttttgaagccatggttgaccatgggtaacagagccacaaaatacaaacctttagtgcatgctgcttgattttagagtgggtgtctgtgctaggacacagtcagatttgaaccactgagtcaaatacatgcttttagagttcccctctacactagattttacactagatccagctcaggttttcttgtgtatatcaaggaatgagccctctatcagatggacaagaggctacaatgaaagctaatgtttaactgaagtgctctttttaatataaaaaaaaaaagtgttaaaaacagattttagaatgacttggctacctcggaaagtttcaggtatctgttcttgattcaaataaagtgtggaattaaggataccccactgagtattcaaaccaggcatgcttttcctgcgttcatctagaaaccagtctgtgcctctgcacaaagaacactcataaactttctgagtattatcaacaaagagacctgaactgcggaatgaacattgaaagagactggaatttctcagtttaaaacaagagtgttagaacatttgggtaataaattatttatctcccttgaattagcaaagggcatgcgcgtgcatccccttctccagggttcaggcaacatcccaaataaaggacagaaaggatgggagagctagaagatgggaagaagtgtggtgtagtgagtgctgtctgctgatcatgctggatactgtgtttgtgagctcctagcagctgtggccacctgcacaagatcaagccagtcagcagggcagcatgcacggggctcaagcttcacctctagctgagtagctgctggtggggactcatggaagagcagtcatttttctttagggatatggttgctgggaggttgcccatggccgttggattgctaaccagactcagtaggttattaaattataaagtggacttaaacatgagaggagggactattaaaggagccccagggaagtgagaaggaaggttggccttgggaacgaacatggtacattatgctgagacatgaataaaagtaaataaaagtattcaaagatacaaaaataaaagtgtatttcaaacaggaggttactaacagacgtcacagtttagaaagaagcgcccacatcgaggcaactctgctgctttcggtttgtaaactttcagtaggtttgggggatgctggggactccttccttccatttaatatttgtctggggtaaatgtaaaagaatactctttaggctgaagagtgtgcaagagctttgtgttaatgtccactgttttgcttgccctgacattcttcataatgacatgtcttggtgactttaatctcaaccacattttgagtcactgtcttcagaatctatctacaaagtggtttctaaagttctgtttccaaacgtgagtcgagtgagatgtcaacagggaggtcagagaaaacctgggcagataagaaattgatcagattcctttgctgttatggtttgtgtatactcagcccagggagtggcactattagaaggtgtggccctgttggagtaggtgtgatcttgagtaggtgtgtcactgtaggtgtgggctttaaaaccctcatcctagctgcctgaaagtcagtattctgctagcagcctccagatgaagatgtagaactcttagttcctcctgcataatgccagcttggatgctgctatgttcccaatttgatgatactggactgaatctctgaacctataagccagccccaattaaatgttgtcccttataagagttgccttggtcatggtgtctgttcccagcagtaaaaccccaatgaagacattggctaaacatctttaatgttctaatgtatatagtaattttccaaacaattgctgtgtagtgtgtttccaacttgactccagaactgttttcacaaaacctttctcatttagctagtgttccaaagaaagtgcattaacaaagtctgccttgtggggagaagtcgcaggctcattctgtgtttccttgtgactcggagtctgcatcttcagatgtaacacatcggctgtatcttcctatcttacaggaatgcaccatgcccccaccagcactcacaggcatgggaatttgttctcctctgcctccatctcccaaacaagtttttctccttgtgaagaccttaacattcttcccacacctgaagtacttgctatggcctgtgttccagatcatctgtaaatatagccccaaggtttctttttctttctcaaacttgattatcaaaatactcttcatcattcagctatgctgtgttggccatctgcagaaaatttcactaactttgtttttaagacattttaagccttaagttttcagagagtccgtgtgaaaagtggcttgagacacatgactgtttactgtaatgatcacatttaaacctttcagataagacccatatgcttttgtttttattgttagaactaggaaaagaacatttttctctccatcaaaatataagtagctttctcttttatttggaacatgaaaaggcttaaaaccagatcagggcacaaggagaacaacgcttggtgacatactgctgcttctctcctcctctcctctcctctcctctcctctcctctcctctcctctcctctcctctcctctcctctctctctctctctctctctctctctctctctctctctctctctctcattaactcattccattttatctccttttattttatgctattttttgggtgcctactgtattaattgttgttattattatcaaattcatgtctccctttatttccaactatctttggaataatttggataaaataaccaaaacagagcaaagcggagaatgtactgaacagaagaaaaccatcctgtccacaaccctaactgatagcagacatcgctcctgccaggacaggctggttacatccatggttctccttgtaatttatgttcacagagttcatggtagcttgttctcctccccaccttcattatttcagcattgccactgtaaatagttgagaacccagatccttcatcacttcttaaaatgcttcagtttaaaaaaatattgagggtcttgggaggcatgggcttgacataaaccatcaaaatcattannnnnnnnnnnnnnnnnnnnnnnnnnnnnnnnnnnnnnnnnnnnnnnnnnnnnnnnnnnnnnnnnnnnnnnnnnnnnnnnnnnnnnnnnnnnnnnnnnnnnnnnnnnnnnnnnnnnnnnnnnnnnnnnnnnnnnnnnnnnnnnnnnnnnnnnnnnnnnnnnnnnnnggcaaagatgacacccaaccaggtgtctgtcaagcctggaaccagggcctactgccagtctactttagtcatcagttgggacacctccttcaggtgcccaagggcctaagtgcagctctctgcagtctccagtgactctagaagcagaaatcaggacggacttgctactcctgatggatggcagctgagctcaagcctaactcactttgcatatgtcagagtgcccaattacccccaaatccagatcacagggaatgctcactgactgtctagtaataagcatgcctagttaatgacacagagatgttttacttttacacttttgtaagtgaaacaatgctgaatgctcctcgcggatatcacagaatagaatgctgtggcaattgtcatttgacttcccgctataatctgaagtttctgtcctttttactcttcttcaaccttctccccccattccagtcctcatccttctctcacctgaccccctctttcttttgttgctgttgttgtttaaagtagaaattcaccaaacaattagtggctcatgcataattcagcatctttacatttccatatatagtttataccattctgttttgctttgttatgtttttgttttgttttgttgttttgtttgagagagtatttctttgtagccttggctgtcctagaaatcattatgtagactaggctggcctggaatttaaagctattgacctgcctctgcctcctgagtgatgggataaaggtaactgtgcactaccacactccactaggtcatagccttattgaggtatgattgacagacacaattacagccatttaaagttcacaagtcagcattttgctgtgtgtgtacagttcagctgaggcacacgtcatcacgtcagcgggttcctttctttccaatttagaggttagattacaaaagaattaaatgacaagttgacatagattagctagcaaatgtgattagtctatgttgattaatatatctactggctagagaccatttgcttctcacagtgatattcactaggacaactccgacactcaggagttaacagaggaaaagtcccaaggctctaggagagaacttagcaatcatctcatcctactgtttgtttgttttgcttttttgagaattctgattttttttttcaagaggtaaaccagctttcttagcacaacatggtgactctcacaaatgcccgcataaaaatgaggtccttattgccaggaacaagaagtgccagcaaagcttcttgatctttctcaagacccccatggcagcctgttgtcatctagactaactcagcgactgccacgggtccctagagtttgcatttctactgagctcttccatgccgggcacccagctgcagctggcacactgaatgttggggatacatttcataggcaacagggactcaccggtgtgtgttctgtcttcagcaaaaaaaggaattcatgactttctagtgtaaattaattacttcctgatacagagagaattcccatcagtgaattgttctgtgcaaggcaagtagaattcctttcagaaatagaataagaacaagaagacagggcatctaaatctcctgtttgtgtagacacaggcatacttctgagcatccttggtgaaggagcccccatgggttcacgtctgcatctcccactcagcaggagggcactcttcttcctctgtagtaatagtcaacactgcgacattgacattgcaagcagaaaggggacagaatgctttgtgtgaacaagagtgcttgcatgtctcacagcatgtctcctagccaagttcacaccattccctcatctgaggtccagcaaccttagagctatcagctcttctgaatgtgccattcctgctgtgctgggctctcgtgggcacagcagggtgcttcaccttaccagcgctagcagcattgggtaatggctcctgtcattgtgaaacgaccctagtgagaactgatgccctgaaacctaattcacacggtggtcaggacagctagctgcaaatgcagcaagggaatgtgaagctccattgaatttagggatcgcccaagtcagaaaaacttatatattgcaactctttctgtttcatcagttctgagtgacatggatttcagttcaacagaaagtcccaagttatatgcctagctggagattttgtcaatgtggtgggcagtggaaacaaaccaatattcttcctcactctcttcagggcaggcctgaactgtgagatcaattctgaactctgcctccaaagatccggctggagagggagatgtctccaatgttataagaaatgcaaacacatcatggtcactccaaaaagagctagtgaacatatgctggtctgggcttgtcagccacctgctagctaaactttggaatagcatgccttgacaactagttacagtaggccctctggcttatgtttggtatggtttaaagaaaggctttctctctgcagtattagtgggaaatattttcctgataggcaattagcaaacatgaagaaataaagaaaaccatcaggcattttgcataaatatagatacaagtgacctaccaaaataaccacctgctctttatatatgctatctcattttgaaagagaactctgaaggtaaatacgtacctataacatccatgtcttttgctcatagactctttaatatcagtaagatgctatgaccatgcaggctatcttgaagatatgagctctttatagaggcctaggcactaggccagaggcaaggggccatttccctgctgacctgctgaaaagaatgaaagaaaggttacagtttattagcctaagcaggggacaggatccattcactctcagctagcacttcttacacacctgtctgtcgtgacctttcaattcaaccaccttcatgtagtttatctccacttgggaacaaattaggaatctgaagaaaggtgggtgacccacgatcacctatttcagagactttatgctcaaagcagtaaatagttgaaaacaaacttgaagttttcaggctgaccatgtcagtctgaagagcagatgtgtgcatgaatgctcagactcactccttacttctctgcttgctccaagcaatttgcaatatcaatagctgacttacttttgaaatgttttgtgtggttcaagaagtcttaaatctctggatttaaaatttttaagaaactctggatagagagtttcaggcgcaaagtcccttttagaatacatggttccagatacataggactcagatattggggggtggtgtttatttttcttttaagtgttgaaagaaatcacaaacttaacttagtacagatagcagggatgtgaggaggtgtctcactggcggaagtgcttgctacacaggcatgaacatctgagttcagattcccatgttaaagccaggtgggtcagtagagcctgtaaccccagcagtgatggagtggtagggacaggaagtccaggcagactagcaaattagtg

SEQ ID NO: 3147 - DNA, 5375 bp, Mus musculus
acggactcgggggtggctgccaggcagggttgtgagcgacgccgcggcacagcgcgggagccgggaagccctagagcactgcggcccctcctgaccctcgggaccgggcgcggctagcgtgcgggtttctcctccgcggccagctcgggcagcccgagtctcctctgtcgcccgcacctgcgcgtcgcggtcgtcccgccctcggcggcggctcacctgggcgcagcgcgggcagggcgccgcctccgggacgcaggtggagcgggcagggcgcgggcaccatgagcagcggcgccaacatcacctatgccagccgcaagcggcgcaagccggtgcagaaaacagtaaagcccatccccgctgaaggaattaagtcaaatccttctaagcgacacagagaccggctgaacacagagttagaccgcctggccagcctgctgcccttcccgcaagatgttattaataagctggacaaactctctgttcttaggctcagcgtcagctacctgagggccaagagcttctttgatgttgcattaaagtccacccctgctgacagaaatggaggccaggaccagtgtagagcacaaatcagagactggcaggatttgcaagaaggagagttcttgttacaggcgctgaatggctttgtgctggttgtcacagcagatgccttggtcttctatgcttcctccactatccaagattacctgggctttcagcagtctgatgtcatccatcagagcgtatatgagctcatccatacagaagaccgggcggaattccagcgccagcttcactgggctctaaacccagactctgcacaaggagtggacgaagcccatggccctccacaggcagcagtctattataccccagaccagcttcctccagagaacgcttctttcatggagaggtgcttcaggtgccggctgaggtgcctgctggataattcatctggttttctggcaatgaatttccaagggaggttaaagtatcttcatggacagaacaagaaagggaaggacggagcactgcttcctccacaactggctttgtttgcaatagctactccacttcagccaccctccatcctggaaattcgaaccaaaaacttcatcttcaggaccaaacacaagctagacttcacacctattggttgtgatgccaaagggcagcttattctgggctatacagaagtagagctgtgcacaagaggatcggggtaccagttcatccatgctgcagacatacttcactgtgcagaatcccacatccgcatgattaagactggagaaagtggcatgacagttttccggcttcttgcaaaacacagtcgctggaggtgggtccagtccaatgcacgcttgatttacagaaatggaagaccagattacatcatcgccactcagagaccactgacggatgaagaaggacgagagcatttacagaagcgaagtacgtcgctgcccttcatgtttgctaccggagaggctgtgttgtacgagatctccagccctttctctcccataatggatcccctaccaatacgcaccaaaagcaacactagcaggaaagactgggctccccagtcaaccccaagtaaggattctttccaccccagttctcttatgagtgccctcatccagcaggatgagtccatctatctatgtcctccttcaagccctgcgccgttagacagccattttctcatgggctccgtgagcaagtgcgggagttggcaagacagctttgcggccgcaggaagtgaggctgcgctgaaacatgagcaaattggccatgctcaggacgtgaaccttgcactctctggcggcccctcagagctctttccggataataaaaataatgacttgtacaacatcatgaggaaccttgggattgattttgaagatatcagaagcatgcagaacgaggagttcttcagaactgactccaccgccgctggtgaggttgacttcaaagacatcgacataacggacgaaatcctgacctacgtgcaggattccctgaacaattcaactttgatgaactccgcttgccagcagcagcctgtgactcagcacctaagctgtatgctgcaggagcgcctgcagctagagcaacagcaacagcttcagcagcccccgccgcaggctctggagccccagcagcagctgtgtcagatggtgtgcccccagcaagatctgggtccgaagcacacgcaaatcaacggcacgtttgcaagttggaaccccacccctcccgtgtctttcaactgtccccagcaggaactaaagcactatcagctcttttccagcttacaggggactgctcaggaatttccctacaaaccagaggtggacagtgtgccttacacacagaactttgctccctgtaatcagcctctgcttccagaacattccaagagtgtgcagttggacttccctggaagggattttgaaccatccctgcatcccactacttctaatttagattttgtcagttgtttacaagttcctgaaaaccaaagtcatgggataaactcacagtccgccatggtcagtcctcaggcatactatgctggggccatgtccatgtatcagtgccagccagggccacagcgcacccctgtggaccagacgcagtacagctctgaaattccaggttctcaggcattcctaagcaaggtgcagagtcgaggtattttcaatgaaacctattcgtccgacttgagcagcattggccacgctgctcagaccactggccatctccatcacctggcggaagcccggcctcttcccgatatcacacctggtggattcctgtagctcccatgccaggatgaaattcattcaggaacaggataccagaactgtgagggttggacatcagtacactttctccaaaacagatttcgattcttgtgtttagagaaggagtttaaaacccgtacctgagatgtagggatagatgctccctatacgatgggagagctcggacggagcacatgggaggagttcaggcacctcagagtgcacagtgtttactgtggaaaattctcgggttccctgctcagtaacttcagcaggaaaaacagggaggtatttggagctttgaacttctggattcttgttagtataccaaatacggagttacaggactaactgatttcctatattttttaacctctgtttttgtcccagaagttaaagtaaatggtttggtgcttttctcaaaagaaaatctcaatgctttccttctgcactgttaatataagtgcctcactttttttgttgttgttgttgttttctgatttttttctttttttctatctacctgtaacacaatagggtatgtattttatatgaaatattttttatcttttttgaattaatattctttctgcacaaagaaagtttcccgaatcccaacctttctatgaccccgctgtgtgtgcactactcatcctttccttcagataaagagtaattgataactcaaagtccactatttattgtgtaatatacctgcttctggccgttagatgttcctctgtgccttatgttgaaaaatttgaaaaataacatgttgcccaaattatttaattattacatactattagagagtagcacttgtattttaaccgtgttttctgagacgtgagataacgctgctgctgaaggtttcccagaaacctccacgatgagatcagaaggccaccgtagaaagtgctaaaggtgcctatgtccactacgctgcagtgaggggaggtggcgtgtgtcaagcctgttagctatattaagcagagcactcatttcactctgtctaaattatctttgaaaaactgtctgtaatcctgtttgtgatattgactttataaattccacttcttatactagtggaagctattcatttttctcatatttgaggagtgttaagatggaagatgccatgtcaggtgcaaggtgttttaatgactgaaatgaatggtgcattgtataaacataacgaacaaaataatctgtaaaatattcgcagttttcatttaagaatagttcttacctcatatgcattttttcagtgtatcttgtaaagaaatcaagtagtaaattgaagcttttacgttggcattaagataaagataaatacaatttgttcacctccataccttaagttgtttatgtgatacaccctttgctgccaatatggcaaatgtgtcactctgccaaatgcactgttctcaaacggcttaaagaaaaaatgctggtgtctgccattgtctctgttcttgcttagatatgatatatgaaggatgtggtcctggatctgtttttcatatgttatataaaaagctgatgagatcccaaactgagatgtattcaaatccagaagtggttctcaacctgtgctctgtggctcccgtgggagatagactgaccctttcacaggggtcccctaagaccattggaaaacacagatatttgcatcacaatttataacagtagggaaattacagttttaaagtagcaatgaaaataattttatggttggggtcctgagcaactgtattcaagggtcacagcattagaaaggttgagatccactgaaatgttgactcttctttttttcttttagaaaattaatgtatgtaaacatgcctttgggaaaaagatctcttctatgcattttcagtcaaaattctgaatctctaggattaagcattgaaaaacaactgtctaaaacatttcacaatttttttccagcatgaggtgtcaccaaggatttagactggtggtctgaattagtatcccacttttctatgtaaacttttcattaaaagttgtcatagaaaccattttgtcagtctcttctgcatgttaccaaatattcagttaaaaaaaagaagacaactttggacactgagagtatggtggcatttaattacacacttatcaaactgaaagtcttaaaaacaatattgtgtgttcttatctatataaaaatagctaaaacatctaagaataataaaatcacattaaactgcctatttgtttgtctgtattgccaagtgccaaatggaaagaccacttagagcaccactagactgagggattaacttctagatgaaattctaagactcttgtgtatgtctgattgaagttcttcttttctaggtgtttcttacagcacctgaacacttaaccaatatgccagtgtatcaacttttcaattgttactatgcacaagctagtttgagtatcaatagatcttaggtctacatagctccttgctgtcctttaaactgttacttgcttacatatgccatgcatagatttttgttaaagtatgatttataatgtccttaaatatcaaag

SEQ ID NO: 3148 - protein, 913 aa, Mus musculus
STAAPPDPRDRARLACGFLLRGQLGQPESPLSPAPARRGRPALGGGSPGRSAGRAPPPGRRWSGQGAGTMSSGANITYASRKRRKPVQKTVKPIPAEGIKSNPSKRHRDRLNTELDRLASLLPFPQDVINKLDKLSVLRLSVSYLRAKSFFDVKSTPADRNGGQDQCRAQIRDWQDLQEGEFLLQALNGFVLVVTADALVFYASSTIQDYLGFQQSDVIHQSVYELIHTEDRAEFQRQLHWALNPDSAQGVDEAHGPPQAAVYYTPDQLPPENASFMERCFRCRLRCLLDNSSGFLAMNFQGRLKYLHGQNKKGKDGALLPPQLALFAIATPLQPPSIIRTKNFIFRTKHKLDFTPIGCDAKGQLILGYTEVELCTRGSGYQFIHAADILHCAESHIRMIKTGESGMTVFRLLAKHSRWRWVQSNARLIYRNGRPDYIIATQRPLTDEEGREHLQKRSTSLPFMFATGEAVLYEISSPFSPIMDPLPIRTKSNTSRKDWAPQSTPSKDSFHPSSLMSALIQQDESIYLCPPSSPAPLDSHFLMGSVSKCGSWQDSFAAAGSEAALKHEQIGHAQDVNLALSGGPSELFPDNKNNDLYNIMRNLGIDFEDIRSMQNEEFFRTDSTAAGEVDFKDIDITDEILTYVQDSLNNSTLMNSACQQQPVTQHLSCMLQERLQLEQQQQLQQPPPQALEPQQQLCQMVCPQQDLGPKHTQINGTFASWNPTPPVSFNCPQQELKHYQLFSSLQGTAQEFPYKPEVDSVPYTQNFAPCNQPLLPEHSKSVQLDFPGRDFEPSLHPTTSNLDFVSCLQVPENQSHGINSQSAMVSPQAYYAGAMSMYQCQPGPQRTPVDQTQYSSEIPGSQAFLSKVQSRGIFNETYSSDLSSIGHAAQTTGHLHHLAEARPLPDITPGGFL

SEQ ID NO: 3149 - DNA, 67536 bp, Homo sapiens
gagaatgccacgagacaattttgatagttgcttttcatatcatgaatacttatctttcaaaagaggaagcaatgttaaatatgcttaatatggtttaatcctctcaaagactttgtaaggtatcaatgaaacttgcacatgtgtgtcagttaggttttagtacaggaaacagataagtttcaggtatttcaagtaaatagggatttaaaacagggaataaaatgcttactaaatctttgggaaggctagagagagaggctctaggctgggaattcagaaatgtttccataacactgtagaactgacttattagagaaagatgacctttgcttcaatcagaaaagtggggacttcagaagtcactataaaatttattgacttcaaaaacacaccattgtagccacaattaagagatcagggagccactactgctcacacccctacagcctctcaaaccctagaacttggatgctggaacccatcacagaaaactcatatttccacaatctcacttattagcagaaaacaatggaagcagcaggaagatgacctccacttgacttttgcttccaaatctcaacaagtgcacctaattggatgaaacttatttacatttggaagtttaatggcacaggaatctgggaaaatttagtttttagctttccagctgctgtagtatagaaatacacagaatggaaaagtgcaaatggttgccagttggccatatccaccatactgagattcaaaggttttagaaatttcttatccaaggtcacagaacttgtgagtgctagagcaacaaacttgaattcaaagattttggccacttgcccagtgctctttccactacatcagtctacagcactgattactctctgaagacatttgccaaaggagacatattttcaaatcttgtgctaattatatttttcactgaagcattaattcaggcatctgtgaacattgttaccttttagtcttatgtcaaacctagttcttcttccaaactcagacttaatcttattttacagtaattacagttaaaccaacactgctagggtttaatacctttgagtatttttctcagcaggcttgctgcttaatccatttaatgtcagaacaacacaaaccttcttattaaaatgggggaaaggacattattagagactgcattagtggtcttttcttctttggggtaaaacctaccaatatggcaatatttgcaccttatctttattttgttttctgctgaccacatacagaaaaacattaaaaaaggaaagatttcagatgttaaatccccttgaattctaattacacataaaagtagaatgaaagctctctgaagcaaatattcctagatttgtactttaatattaaaataaaaaatatgaactatgcaaatatttggacaaaatgaaaaaatataatgcctcagtaatattcatattcaattaaatcatcactttcatttcaaatgcactttaaagtaatttggggaacatattttaaaatgtacatacaatgacctaagtacaaagattcctaacatataccttaagagaaaaatagaaattactacctaacacttctgattagacttaagcaacaatactatgttaaaattaaagaggtgattaaattcatataaataaaaggtacatatcatgattgtagttagaagagatttgattgcactctttaaacaaggagataattattgttcaaaagttgttagatcaagtggatctagtagttttgtgctaagagcatatagaaaagaatataataaagaaacaatgtatgtggttgttaaggatcaaataaagacgttatgtgagtcttgtgtaggttagattacatcagtatcacagattatttatctccacatattcattagatacagaatgttaactttataagagttggcaaatttttaaatcaaaaggaactattgtattcagcacacaaagcagtgaaggctgtgattaacctcaagagaagtttggggtgcttactagagaaaacaattgatcctgagatttttctgaacatttctatttgtcattggaatccgtcttttgtaaaagactgttttcactcctgaaagtcattatgtactctctctgtgtacacacacacacacacacacacacacacatacacacacccctctatatataatatacacacatataaatgttgaggggtatattagagagatcacacaataaggctttttcctttgctttttacataggaaactaaaataataagttcaatttaacttctaaattcattcagattagaaagaaaaataattaaaaattgtgatagtattttttttgttgaaggatcttttacattaaagtcagcagtattatttggtaagtgggctacagagtagaacttaaaaaatatatccctatctcagttatcccacatttttagtatcttataagaaatgaccaggccgggcatggtggctcatgcctgtaatccctgtgctttgcggggccaaggcaggtggatcacctgaggtcaggagttcgagaccagcctgaccaatatggtgaaactccaattctactaaaattacaaaaattacctgggtgtggtggcatgcacctgtagtcccagctacgtggaaggctgaggctggagaatcgcgtgaacccgggaggtggaggttgcagtgagccgagatcgcgccactgcactccagccttagtgacagactgagactccatctcaaaaaacaaaacaaaacagaaaaacaaacaaacaaaaagaaatgaccaaagaccataagttgtaaactacagaagttgaagttacctttataatgattttatatatatgtaattatatatattatttaatatatgtatgtttgtgtgtgtgtacttgctttttaaacagacttatgttggacatatatttcaatgtcaaagacagtgcttttcattattctttaggtaaaataatgaggtgtacatgactctagtaagagctaattggaaaattataatgtttgacactcctttactgttttgttttcttattttttgactattaattaaaaggatgtgtagaaaacatgaaaaattaagtattaatttcatggtgacagatatttaccatctattttttctgagcataacatatagtaatatagaactcagaaattactggcttaaatcaatgctattgtttattaccaaattaaccattattattctagtcatctactgaggagtatagtttccaaataaaacttaaattgccacttagagacttgaccctaaagatgtaatgacataaagtgctcagttttgagaagtatatttcactttgtgtactgatggattttcctcatcttgttgagcagatactaaaaggtaagaaaagggctattaagttacagctattaagtactatttattattattgaaaaaaatatcatctttaggttgactgataatgacatttcttttagaaggattgagtgtttgtgtgcctaaaaaccacgacctacttcataactggctaataccttcagtatgaacaaactttttaagaataaactgctgtatgtgaggctacttcttttattaatatttcatgtagggcatgtttataaatatttgagaaaattctatcagaatgtcaaccttttttatatcctaaaataggcaaatactaattaaaacaaaatggtctgggggattgaattaccctctactgacctccatttttctcatcttgttaatgcagttcttactgaaattaacatttgtctgaactgttcaagagtaactaaaaaaaaccaaagtttgcattttatatcattcatttactttacatatacaatcaaagcactctaacaggttacagattggtgtttttactcatataggtgtatgtcaactttcttttataggggagatttgcttcaaagaattatacaaaaaactggcataaatatgaccactcacaaaatgtgtttaaataagtaaataatatggaaaaatacaacacaaatatgtaatgaatatttgaaaaccctggtttctgaagagtttagatagggattgtttacattataatctacttggtatttctttaaataccaatgtatcccaaaataattattcgattcacatgcttttctctgaaacatatttgctttatgtaatttatttaaaggctcagataaccagaatgaattcaacctaacgcaaggattaaaagaatgtaagagatctgtccaagatctgggaatacatcgaatccttcctactcattttcatcagaagccctcgcctctgtgaagacagatgggagctccatctacattcaggcaggaaggccactcaactaaagtttaaagttttacaaggaaaattcctacagcttgctttaggagggaagggtggagaacattctgttttacaggacactccaccctcagctatatccccttgattaattatgtaaccagatctccttcatcaacttaccgattaggtaatggcaggtatttctgatgcttggtatggggtctgagtgaggagggtcctaaaaatattacttatgcagctgttttgcatagcattaaagtgaaaagctttaacttgcagtacaagttaacatttgttccagacttttttttttaaactattattttagcatgtaagccttatagacataaatcctgtctactgatacattataaagtctcagaaaagtcagtgattatatacaggaaagtagataaaggagaaatttcaaatgcataagaacaagcaaaaaggtattcgtaaggtattagaaactattagcattttagtataaataactggtgaatacagcaaaatgaataatttgtggttagtataaatcagctaaattcttgtaatgcacaactaactacacatattcttcagcccacggaggccatacaatggagatttgggattctaactttgttttcaaaatggagaagtgcagaaactttgaatcttttaaaatttatcttccatctgtttcctgtaatatcaagatttagagcaaggtctaaagctttatcttacgtaaaagctgggtgcctaatatgtatctgtcctgacctcccatggaaacaattatcaggcttcagatattttgtctctcaattttttaacttgaaagtacatggctatttatttttgcacttattttttgtttttattgtgcaatttttcaacatatggcaaagttgaaagaataccacaaatgtttgtatacctttcataattgtgtatatgtgtatgtgtgtgtatatatatatgtatatatgtatatatatatatgtatatatgtgtatatatatatatgtgtgtatatatatatatatatatatacatatatatatatgaatgttgcagcatgcatttcctgagaataaggatcttctctttattctagaggtatatacctctacaggtgatagaggtatataaccacaatacctctatcacctgtaaaatcccgattccaggacacaacatagataaattaaataaaaatttttgtagtggagccaaggatccgtaatttttacagttctcaagtgactacaatatgcaacaaatgttgagaaccactgtccacacattaattaaatttgttaaatattttcagtaaagaatacattttgtttcttaatatgaataagaatgatagccttttaaagtttagcaaatctaaattatatattttaggtcagcattttacaataatttacatttccttaagctgttcttatcaagttaataattttctttgttaaataaatgtattttatcttaatttcagtttcttctatatcatgatttaaaatgcagaaagtatgtattatgtagttttcaaatatatttatctccaaagttaaatggattttagtaaaaatgatatttatacatatatattttaataaaatgtttaataaattagacatgaatcttagcatgtgaaacataaaacttttttataactttccccataatcaaacttcaaattcgtaagaattaaaagtccggaaagaaagaaatcgaaatccaaacttactgcatgttaacattttaataatgtactttcatgtgttaaaaacctaaatgtttcttgcaacaaagcattatccataagtgaataaaaataattttgactaataacaaattattcctatcttgtagtttctttgtcagaattaagattagcattatctattaattacttctctgtggcttctatgacattgttgtatccaagcaagtaaagaagacattaagcatttagaaacagcccttagatgtctatgtctgttcttcagtgttaggagtaaaagcaagcaatgtgtaaactgattatttttaataaatgaatcagaacagttcaaagtcagataagttatacattttagactggggcagaagtcacaagacccagattctaggctatgattagcagggcacttgatctctctgggcctgaagtttctcacctgttaaatgaaggatttagttatgccaaaggtcccaaactttctcagttcacagcattcctagtgtctcagtaattttttcatggtgttgcaagctaaaagaaacacctaacagttccatttattaaacagttaaacccaaacttatgtttgtctatcctaacaacttagtagctatttaaaaaataatatacattaacattttttattcttaatgggatgtgcacatctgttgggcacttcataacttctcaaacttaggaataaacttggaaaccgctaccctcattcctgttctacagtaattttcccatagtccttgtgttttattacagcaatttacaaaaacacagcctcacaaagatacgatgtcaaaaggaatgaagtacaatttaatgtgtagaagttctgaactacctcaagatagtggtttgcacggtgtccaactgatgtcactgtgttggccttgaaaatttaaaatatcccatgatagtgcccctgtgagtttgttgtggtgctcctggggtgcctcagtacatagtttaggaagcatggactaccctctgtaaaatacttcatatagctacaatgtgtgttgtaaactgtaaaagacaattctgagggcctgaagtaaggagctgcagaattgaagaggagattaaaaagtgatacatgttcagtctgcatgaaattccccttcctccccaggtcacctataaaatgcctacctatgcctacctataaaatgcctacctatgcctcaaaactcagctcaagctccctcagggaggttaccaagttacccttaccaagttaaatccacctattatacattctcacagtattcatttcacagtacttgtcccagttgtaattatacattcatttgtgtaactatctggttaattcttgtctctctcattagaatgtaagctctaagaggaaagaacatgtctgatatcactactgtaacccacagtgtctggtatattataggggctaaaatcttgcttagtgaaatgaactgtgatagaataggtttagcattcattttgattattttcctttattcaagaacagctgatatttataatagcattcctaaaacatttttctcatactatttcgcaggagaaagaaacccatacacatacagctgcatctgaaacctcagaaactaagctcaacccaattgattaaaaggatgttctttggataaggtaatcaaatgttcaccgactcttatagccaaattaattattatgagataaaaatcacgtaactacaaaaaaaaaaactgctcacaaaaaagtttttaaatcttagcagatggacacaaaccatactttgagaaccatgttccacagtgccaatacaggaagtttctagataatggcagctcattttttaaaaatggcactacactatactgtattcacatgccagcaaaactgttaaggtaagttcatgtcactattaaaataaaatgaattctgggaattttgttgatattcaattttaatcttaattatgcaaagatctgttacttaactaagactatgtaacataatatagcatatgacttctggataatgaaaataatcctaaacttaaccataaaaaaataagggtatgaaagtcaaaataaggtagaaaatgactgcaccaaatagccaacaaccttaaaaagggtaggatttttttaaatcactaaattaagattggttcattgcatttagtacatctcttttatgaagaggagttataagctacagaatcaataaattatgttttgatataaatttttcacccttaaagttcctagctaggaggaaattattcttttacacttacacgttttagatagaatggctataagtaagcacagataaatgaagaaatgaaagagaagggaaaaatagagatggttgattctgcctctgcaattgctaattcataaacatcaaactttcccagtgtacactgtcttctttgggaatttgctccatctttttccttaaactgaaaggtggcttactgaggctatcactttcctaaaggtctccccaatactgcctaattattttctcttatcacaggatacagggtggatgtccatctacttccttgttgtcacttcccagatcactttcactttatgctcttctaaaattaaaacaaagatcatcgaccacaaaacacaattgttcttttgtagctcatgctagaataccctctttgttacatctccttcatttttctgatccaaaatttagtagcctactatatctcacccactgtccttctttcctccagctatggtagagaactgctcctccaactttatgtacatttgaatcacctgggagttcctgtgaacttcgggttctgatttaataaggacacccaaagagtctgcatttcctgtaactctcaaaagaagctgtggagtactctgaatagcaaagcactgtaagtgctgtttctgttagtatctaatctattagtcctaatctcccatttatgctttggcactcattccctcctgctttcggtatcttaatatctatcattccttcactcttccctcaggttccctacatagtttatctctaccccctctaagccgctcagtatcgcccattaaagaactaaaccaaaactagaaaaccctcatttaacccttcactccccctacatacaatctgatgtgtctctcatccacagctaaacttggaagaaaaattgcctgcttgaggatgccattttgttatcttcagctcaatcctgtacccacttcaatgttatttgcaggcccattaccccaacactgcattcacgaaagtcatcagtgactacacattgagaaaacaagaatgacattttcagttctcaactaatttgaatttctcaacagtattcaatattgttaattactcccaatatttttccacatggtcctccatgacacaatacataatagtccccttattatctatattcctgtctattgtaaagacttcccccgcacaccaaaaaaggtcaaggaaactcctagccttcaagtctcaactcaaatctggccttctgaagccttcccaactaggaaaatatacagtcccattggttgtctaccagttgtctaccagttaattgtaattcttagccacaagttagctgacccaccgtctctcaaacaggtgaagttaagctcaatatttggcatatcttgatatactttgtacagtctagctacaataagtttgcctatgcacgaagatggctaccggcgggggggggcgtccttacgtcctacgtcatcacgtgccgggatgagggtggggccctcaaggaagacggaatggaatccagatgggcgggggcaagcaggacggggcggggctacgcgggatctgggcggggcggggccggtgaggggtcgggggtgctcctgctattcagccggtgcgcgcggcggcgggaggcagtggctggggagtcccgtcgacgctctgttccgagagcgtgccccggaccgccagctcagaacaggggcagccgtgtagccgaacggaagctgggagcagccgggactggtggcccgcgcccgagctccgcaggcgggaagcaccctggatttaggaagtcccgggagcagcgcggcggcacctccctcacccaaggggccgcggcgacggtcacggggcgcggcgccaccgtgagcgacccaggccaggattctaaatagacggcccaggctcctcctccgcccgggccgcctcacctgcgggcattgccgcgccgcctccgccggtgtagacggcacctgcgccgccttgctcgcgggtctccgcccctcgcccaccctcactgcgccaggcccaggcagctcacctgtactggcgcgggctgcggaagcctgcgtgagccgaggcgttgaggcgcggcgcccacgccactgtcccgagaggacgcaggtggagcgggcgcggcttcgcggaacccggcgccggccgccgcagtggtcccagcctacaccgggttccggggacccggccgccagtgcccggggagtagccgccgccgtcggctgggcaccatgaacagcagcagcgccaacatcacctacgccagtcgcaagcggcggaagccggtgcagaaaacgtgagtgtcccgagcgcgtcctcatcgcgggggctgggcgctcaggcacgcgggtgcgggaggcagccccaccccgcccccaaatccctgcgatcctgggattaggtccattcccggcactgcccgtggaatcgaggtttggaggccggctgggagacagaggacttggattctcccgttttcaatgattgcattttaaaaattgtcctcccacccatcctcttcccccgcaccagtgcatacacaccctctcacatttgcaactttgttctttctgatttggtcctgatttgttgacagctctgatctgccttgggctaatggattagttagtataaacctgtcttgaaatctccttccacttttcatatccgcatgggttaggttagaggacggtcttaattctcattcttcgtagagtttggtaaggcgagatgttttaaagagctaaacacatgctgacttttacgaaggggctgagtgcctctaaaggtactttttggtccccaccaactggctttgtgttgcgctcatatttacttatttggcagcaattttgtagcgctcatcgtgaccatatcggtaaagtggatagaagtggtagcaggtgggagtggatgcaacggacaggatacggtggaggatttgtattcttcagacatctttttcggaagcttgcttatcacttttggggtggctttagggtctgtaaaataaaagatttagaactgcatttgagagaggttttcattcttaacatctacctctaattcttttccccttcaaagttttcttctagttgagtgagtacaaacttgcttttgtcgttgtcggttgattttggtggaatatttgtgtgagatggccaattttttgtgtgtgtcagaaaaaactatccgtgctcaaaacatttcctgttgtgaggtggttgtattcatgtgtttattccaatttttttatttctagatctctgagttactttacctacatgtgtttcaagttttcgtaaacaattttaagaactcttaaacgtcttctcagaccaaatcagaagtgtgcattttgcttagactccaactatcactaatgggaaccagaaaaataacactttaagatttacatttaaaaccagttattggtttaaagtttcattctaaaattttagtttcctttcagaatttcagttatcatagttcttcagaactatacttatgaattggcattaacagaggataataatctataaatagactgatgaaaatttggaagttttatggtacagtgtgtcttaagggaatattgtcaaaccagcagttttctaccttggcagtttgagacatcggttattaatacttttaattttgtagaatggtttcttatattaaagtatgtttgtcttatttgacattgtcattgatggttaaagttgggaggcatcccaaatgtctgttctatgtgtttattaatataataatacacttagcatcatatataataggggtgtcatgggttttatgtgtatggtgagaaaacatgaagatctccctgatgtgtttttaagatactgggtttcagttagggtgttatcaaaggacctggatggctttgtaaacaaaaacaaatgccataattttgtattcattacacagtttaacatttatggattttggttattttgcgtaaaatgtactttttattagattatcctaatattatacttacttagtttttaatatacttgtattaatttcttataatataacaaaagtattttttccattcacccacattttgttagcatagatgtttatcagatctctgctgagcaccgtatattgcttctaatcatacagatgccttaaatattaccagcttgctctgtaagaataggctagtgctggcattttcattatcaagtgaaagtgtttatataaattatttttacctgaatgaaaaattgttaactttataatgcagttaatcaaagtttattttagaaatgaagtcattaaacctagtattaaatttgagttttaaaattaaactaccagtttgtggcctaatgagccccaaaacatgccaacattggggaaaatagatcttgttttgagctgaaaatgctatccagacctacttaactttgacctcttaaatgagagccattttattttatttacagataaaatatgctgtagcattattataggactgtttaaaaagacagccaattaaatataaattttatggaatataagtattccataaaattttggagtaaagtaggtgacaattgtaacctgaagctctttcaatcttgagttgaatttattaagaaaaatcaaccccccctagtggcggctctcacattgaaaattatctttattagtaggaaatacattttaaatgtgttcaatttaatcccactgaagtatctccaacatagtagactctcaataaatatttcctttctttttggagtaatgaaggttgggaaattaaaggctctgaagcaactttacgtccaattcatgttcctaccttcaagaagaaaatatcaaagataactttcattatagaatctactataactttgcttagactgttgccccatacttagtgaccctactcagaaaaagagaacaaatcctgtgtttattttattctctttggaaatgaaagtgtttatttattttgtctcatgaagatagtcaaaaaggccattatataattaaatagaatgtttttccctagtgataattttgtatatatttttgtatttttaaggttttaatcataaagaaaaagttgtaatggatttcagcttacctgtacatagaaagttggcactgaatgttggcaaataataggtgttgagaaaaggggatctacactttaaaatgataccagctgtagtggtgattaagccattatgaagtgtcagaactggaagtcacttctgagccttagctgatctttctttaaaatgcatactgataaaaacttttacttttattaacatattaataatataaaagcattgtcttgctattctttttaaatgtcatgaatttcatatatgtaatactgaattgtattacttacataatactcattaaatgttttctataaatttatggtgccatttttaaaatagcatctaaaataaaagaatgggtcttttcatttacacaattatttctccatcatttttctttccaatagctttagatagcatatacatagtagttatggacacttgcttattagaactatgaaatgaagtaagtgaaagtgtttagttataggtaacattaaatggcaaaaagaggaaacaggtataaattgaaagcactggatctaaactaaaaaatgaggtctagtttcttcactgttacagatctgggcaagtttcttgaccaataaagcacgacagtcagcacctgtactgctactctcacaactaaaacagaacaaaaaaaaaatatatatatatatataaactgtgaagactgctaaagatacaaatgaaacagaaacgtaaattctattcttttagcttacattatcacagaacaatcaattcgcccgtgaaacagtaagaggcagtatacgattatgttctcaattacggctacggctgaaatgtgctacttcactggtgaataaatttacatagtacgtgcttactcatgtatttaattaagacagttacttagaaataaataccatacaaatcttttacaacagtacctttctacttttatgcttcttttaaaattgatattttgctagtggcttaatatgacaaaagatgactgtttattagcacttattctgatacaagcttgcccagttctttacatcattttcttcatttttataatagtactaaagaaaggtagtattatttaagtttatagatagggaactgagattcaaattcagagttgctcagataatgagaaagagtttggatattggatcccaggtctttttgcttcaaagcttgtgttcttactgacttgtgttcgtactgtccaggtgaacagattcagtgatgcatacagtacagccatatcctagggattttcactgtttcttctcagatagtgttatggctgaaataaattatttgtcatttcccatacataatttgtacttgctcatccccatacttgtgtttttacgtcctttcctcttagagtcttttctcctgtcttattgatttgctacccacctcccttcctctttaaaacattgtttttaaaggctgcataatactctgttgtactaatattctataatttttttaactgtttttcttttgggaggaaattttattcccaaccatttaatactttaatatttcagagaatacccttgggacgtgtaaattttaatgcaaatttatttttttaggaaaaaattcctgtaagggaattttgggataggaaagtatgtgttgttttaaggttgaaccaaatcgtacactccaagagatagtatcaaattaagaaaaatttactaattacattccatcatcaatctggggatgtgactatatctttgcatttttgcttaaaaaatattattgtcaatttcataggcaaaagtgtggttggtaattaaagttatatgttgggatcatggttatgtataggagaagcacttgtatttgcagattttctacttagggtgtcctttacgtattcatttgttttgtcttacatttttcagtcatcttttagtttgttctttttacttctttctattgaaatattgttttaaaatgtattcctattaaataatactggcagattttaaaagtcaattatatatgtggcacatcttaagtatagcatgtgaggccttatcttttgatgtcttactgtggtagttagggattttagtgctgtcttgtctcactttaacctttttcaccttcctgcatcctcccaatatattttatcacaattttggattatatacacattagtgttgtattatttttgactgtatattgtttactgtttagctaagtaatatactgtgattatatttgccttcctgttctatgctattattgatttcttttctaccatcttcctgtttattagcatctgggtttagctgtcacttaggttcatcggagacagagtttgtgtttctggctcctgcttttcttgttttggtgtggttttctggaagagaagggtagttgcagaaagctagatattctgccgtcacagaaacagaagtgtcttgcctgtatttaagacccgatttagatgccacatctccatgaactcttttgcagcacctgtgttactgagcaatatattatgcttgattttgccatgttataaaatatatttcctcctagtaggaaaaagaatgtctttaaagataggactattatttgtctttgaaactaccagagcttcccagtacagtaccatgcacttagtacatatttgagatgtactaatttaacaattaactaccacttaaaatttttttggtaatgttttagtgattctggtaaggcagatacattttatgcgggttcgagggggaataaaaatgtgtgtttgcgtagaagaagggggaggggaaacaatgagttttccaggattatggaactagtagtggtttctaggccatatttcattttcctgatcttccctgctaatgtcttgtgctagaaactatgctgtttatatctcatcatctctcctcaggtatagcaaacaaaagggaaaggaaagaactcatcacaattatagggcagcagcaggagggtggcagaagacttctgactcattaaaagtggcttccagccagaattctcagaagtttttgtagatgtttttgactcatatagggaaataaaatatccagctgtgttcagcctgacaatgaagttggggtctatttgtgctatgtgtcacctccattacattaagcacatagtttatgattgtaaatatttgaaatttatattcagagataaatacggatgcactgaagctgggggaaggaaacgaagaatgaatggggttaagagttgggctttattgggtgtaggtagtatggtagggggattttattgaggaatacttcagatttcctagctgttagatggagagtagcaccatagtgctgagaagcgggtgcccaactccaggggaatgttgaatggaagggcacagggtcaggtacagggactggaaataaagataaacaagttatgggtaagtagaccaacgcagtaagagtagattaaatcaccccgaggaaaaatccgatagagcaaactcagtactgtgagaggcaatctcttgttaaaaaacgtcactttgatctcataggattactgaaaccatatctttgcatgtcattttgaggttttataatgaatattatataaaacagttatatttatgagtaaacttggttaattttttcagctttgcttcaaacactggctacaaatgatgaacctcatagacttttttgatggagatgttaaaaaggctttcaagatagcattcagactggcattgggcatactgttgggcctgttaccaccagcagttaaagcttgcagggcttctaaacagaagcatggcatgcagtcagctggagtcttgatttcataacaattttacagattgggacaagatttttgaggtaaaggtttcaaaaaataataagttactcctttgcctgaccaacatcatacggtctatttcaggagatgtttgaactccagagctcccaaatccaatcttacagggatgtttatttatatttcaaacaggcttttccttaaataatggttagcagtgtcctttcttaaagattcgaagacaatacaaaagtaaaaatattagcgtaatccaagtcaagtgcagttaatgtaagattactctatttttaattgttctgtatatcttcaagatgtatggatagatattaaatattttaacaaaatctgtacatttctcacaaaatcagtgaaaaagtgggtcaaatgcattacctttgttagctttaacaatctgacattttaaaagcttcaaatccagtacatctgaattgttaagttctgagggtacttcttagccctgaccttaattcctctgtgtatttgactttcttcctctgtgtatttgactttcttctatgacctccaaaatattctaccctggtttttttccgtctatcatttcttctctgtgtctatgcctcttccatagccctatacctaaatgttggtattactgaggtctatcctcaagccacttttttccttttctggtacagctctcattaggaaatgtagttgttcttctgagctacaaatcgcagaaccatttgcaacctctcctcactcaatggtttcctcttccttacttcctatagtgagttagtttagttcagtgaacatttgagtctggcttaaatctctcttcaagccagtcctttcttaacctcactgtcactgcctttggtcaggttgtgatcattccttttcttggcacttttggtcagcaaacattaattgagaatccactctattatgctgggcattaaggatacaaaaatgatttaagcttacatagaaataagggtgttaggcaaacaagtataagcaattatgttacttgacaatggaaatttgctctcatgttaaatattttgtaagacacatagtaatgcattagaaatgtagacaattttgcattatgaaaagcaagcctcagaatctagtgtgaggctgaatattgcaaagagccagcacaagacaggcagcagtaccacatggagggatacctttatgttactattagttctccctgtgtcatagcatgttgccttgtttcagcgtttgtgtcactctcttctctccagtgtttcataatcattactggaaagccaccaagagtgcaggactggattgtgtacacactttctatttctgtgaagttgtttgtatggaatattccttaatggaatcattatattagacatttgtataagaagtcaaatggggcagagttgctaatccattgtgaggtaggtcagggaggacttcatgaaagtgatctacttgagcggggacttgaaaccaatgggacataacaaggaggttgtatgaaagcactaaaccacatgttgtaactgtaagtaatttcttagctctggggtagaatagacaaaagcggcttcaatagaagaaatgaagccagaggggtaaatgaagctagaaagatcatgaaggattttgtgtgctaagctaaggaacatggacagttcagagctactgaaggagtttaatcagaggagtgacacagtcagatttatgttttagaaagaagttcctggcatcccggaatcctaacttcagcgaaccctgccctgctttctgtatactctatcaccagagtcagcttggtgaaacacaggctgatcttgtaaatctcagctcaacacttaagaacagatgcctaagtccgatttctatcgttactttgctgtctcctctatcttgaacatttttgcatcagacacccacatagctcacttcattttactcatgtctgtcctgaaacatcacatcagagagaccttcctaggctgtccaaaccagcatcacgtctgtcaccccttagtttcttaccttgctttatttttcttcttagcactcaccgccctaaaagttatatgtttatttgtttatttctccatcctccacctaggatgtaagctccatgacaacaggagcttttgtatattttgtttacctgtaagtgttctgtgctgggcacttgataggtgttcagcatttgttgaaagaatgtggccccaaccatccttcttcttttctctctttcaccctgtgcctctcccttcatgtgggggaattcttacagttcactaatccttagttatgcctcttcatgaaatcctgtccctcactcaagatccatctcagataccaccttttctgtaaaatcttttttcaagcagttgctgcttctgcttagctcccataacactttttgaatagttaggagaaaagtgtttacctgggctgtacaggatgtgatggatataaataaatacttgtcagcaagttattaattaaccagtagagaattacacaatgaggtagacaagcattataggtaaagtttgaaattcagttggttaagtggagaagtgaagtaattaggtgtgacttgaaatttgtttataaatgcaatatgattaggggaaaatagctaggggaaccatcaccaatttctattatatacacagttgtacagacaacctggagaaggtatctgttgatacatacataaacacacacacacacacacacacacacacacatcattttaccgatgtattaccttttttgtagaagtatttacttttcatcttctttctgcctaaagtattacttctccacatacatcactgaaaagaaattatctagaaatgttttgattgggtcatattaatagcactatgcccaggccaatttctactttacaaaagctgatataattccatttgaattgtcaaaaatgtctttgttgtaagaaaacgctagataattactcttctggctaacaggaaggtatagaggtataaggtataaattactttagtttcccagttcagcgtgggtatctgatgatttttaaattcactttaagtgattaatgtctgctgtgaaatcctggctggggtctttgtgtgaagttattcaacttttcttttctgaactcatgttcctctttgacccataagtgtctttattctcaggtgaaaatcatgctaaattgtttagggttccgttgaactttctaattgagacacaagctacgaaagctaataattaagtataattattgtctacatgtaaaagcaaaagttgctggtaatcaccattaacctctaatatttgccaacaagaaatgtaaatagcaaaagtcaaatttattcttcttttaatatttgaggaccacattagatggctggaggaccatctgcaggtgtcagaggggctttgggacattatctctaatgagttgaaagtaaataaatacagaaagctggtgatatgaagataaatactttatttagggttgtccttgtttattgacaacgtcaatgatgctgagatgcttcctgtggaagatagcaaaggaagtatgattttcatataatttatcacaaatttctctttttaattttccaccaaacaatggctaatgcatttgagaggggaaaaaaatcccagtagatctgttaattgggaatcactgtgctacaaatgcttgaagtataagcaaacattttcctatgatgagttcataagctttttaatgaaatattcggaagaatttaacccattccctgtttttcttaagatgtgaaaggaagattttagaaagacttacgtaaactttaagtagactttaaaagtttgttgtgttagagaaatatttgaggagatgttataatgcaatagaaatttttgctttatattttttaaaggattttttatggtattttgtttgtttttcagagtaaagccaatcccagctgaaggaatcaagtcaaatccttccaagcggcatagagaccgacttaatacagagttggaccgtttggctagcctgctgcctttcccacaagatgttattaataagttggacaaactttcagttcttaggctcagcgtcagttacctgagagccaagagcttctttgatggtaagacagaagggtttaatttgtctacaataacgtataaaaaatacttgtactagatatagctgtttctgtgttaataactacaaaaattagccgtatttggaaaatttattgctgtatagtaaaatttcagtggcaaagccagatttataagtcttaaaatcaattttccagttttattcacccaacagatgcagccactgaaatgatgcatggtatcattctttgaaaatcatatatttagaagttacactcaaattgattatgtcaaattccagtttcccttctacttcaatatttaaaagtcttttttaaaaaaaaagaaaagataaaacaccatcttgctggattttctgtgttttcatagacatgtcattttatttatccctccaaacttacgtatatttctaatctttttttttttttttgaggcagacttttgctcttgttgcccaggctcgagtgcaatgacacgatcttggctcactgcaacctctgactcccgggttcaagcgattctcctgcttcagcctcccaagtagctgggattataggcgcccaccaccacgcccagctaattttttgtatttttattagagatggggtttcactatattggccaggctgctctcaaactcctgacctcaggtgatctgcccgtctcagcctcccaaagtgctgggattacaggcatgagccactgcgcctggcctatttctaatattttacattaattgtataccgactgcaagaaatataattaaaacatgtttttcactagaaagaacatttgattgtaagagtcaatagaatttgatttcattctctattgtgtcactgaaaactgtttgtcattaaccaaaccaggtagcatccccgtatctcagttttctcagcagtaaaggttggggttttgagctaggcagctggatgatatttgttacctttaaattgcaatggaagtttttgtttgcaaatgatgtttcagtgtattttctcatgtaaaattaatttttgatttatcttttatctgtctataaggcagaaatagattttttaaggaaatggtctttttaaaatatcatataattttactaaccatagcaagttaatgataaaatctcagtgggctatgtcagtcaatgcttctcatacattaatgtgcttacaaatcacatagggatcttgttaagatgcagattcttgttcagtagctttaggtgtgtccctagattttgcatgtctaacaagctccgagatgatgctgatcctgctggtctaggtcactaggaagtgcctagacaacacgtttatggatatttgactggtaatttgtgtttagaatattgcaacagttaatttccctttagatttatgtttacataatctgatgtgtttcgtctgagcatctttttattgatttgcttgcttgctctcccgtctttcttttggacaaaagctatttagtttaacagttgtggtctgggcaatatacagatttgaggatagtgatttcaggaaagattatatatttcaaagtttcatagtacacaaattttctctgacctatataaaaagtgtttgaattttcagttgcctctataccaaacccttcatcttgggagaagagttacgcagtattcagtgatggtctgtaagtatgtgtgtattagctatagtcatttagctgacatagttggaactagaactcaggtttctagattccttatattgtttttcctgaccaaataatacctacttttttctgggaaccttcgcataggaaagcactgaggattttttcctagacctgtggttcttaaaagtgtagtatccagacaggcagcatcagcatcacctgggaacttgctagaaatgcaaattattgggtccaaccctagacctgtggaatctaaggtggtgggacctttggtgatagggctagatgcatattgaagtttaggagccactgctgtagattgtaacttcaggcctcctcccagcgtcacggaatgctgtcctgatccctagcatttactcacatgctgtgcttagtgcttgaccatgtggtggcagattctgtgatgtgtaagacgtggttgccacccttagagattctggagtctagaagccaaggaggcattattctctgactctgataaagctttattgacttgagtcattttacctttccatttcttgttcctttgtaatggggaatcaaattatatatgttaaaaagaaaaaaaaagtataggtttttcctctgtttagaagtagtacatatgtgtgtatctagacagatacatataaatgtgtgtgaaacacacatatataaacagatatatttctatatttaatgtctacattatgtgtgtatgtgtgttcatgtatgtatacacacagacacatacatgattagataagtgtcctattattcagtgcttcaagtaaaggagatctcacagtctatcttataaagcatgtcatagtttaacacagggttcatcacggaattgttaaaaacttttttctcagctcttcattaatgagtttgtctgttttttattctggttcagtgtatttgacagtaggatcttattacctatttgcatgattccttcatcaactacattatcattatctttaacgttagattcttttcaaactgcattgtgcataagaattacctagaaagctttttaaaatgcaaatttggaggcatgcccctgctgataacaaggaagttctgtgtaaaacccaagaatcagtattttaacaagcatgttacggagtctgaggcagtgatttagcctagccttgattatgccctgaacaagttaatttttgtttctttgccttcagaatgacaaatgcaaacatacaaaatttaaagaagtctatgaatatttttgcttgtgttatagtggtgtacattcagcctaagcagtttcttagattgtttgatacagaaacatacagttagatggaaaatgaaaataataaggttttttttttaatccccaaatttcctccagactaccagtggtctggaaaggcaatgcaacatttcagagcacacagagaatgaaattataagggtgacccttatgaactgaaaaaatggtagatgcaaacgaagagatttgaaacatgctaacaatgattaggatttttgtgtgcagttggacccactcttccactattagggaaacagtatagcgaagcgaagggaagctcaaagtgaataacaggatgcaaacagggggtgtgtaaattcctgcggaaagaacaatataaacgagtaatcatacaatcttgttagaaaggaaactcaagttttactgtaacaatagatatttttccaagaaaatacatctatttattgcaagtttaaataatccaacttggatggatcttcttaaagtttggaaccatgactatactgctgctgctgtctgaaaagcaacactataaagttttaagtactacattaatatttatccatttctaattaattaaaacatattgaaatataactttaaaatacttgaacaaggcttagcaatttttcagttataaagtcgaaaatagtttctttgacatgatttaagcattacatttaaatatattatctctgagatggagggtattttaaaaatttaaataacaatggttacaatcaataatagtttattaatagagactaggatttgggtggttacaatctaatctttgaaactggttgatgtgaagagaaaggattgtttcctcctatatcatgtctctcaaaattgttaaacagtgtacactgggcttgttgatcaatctaatcagcattgtaatgtttcattcctaatttcagcatatctttaatacaatttttaatgagatttccttactattttttgaaatgcccattattatgtaaatattttgttcaaattattctgtttttatacagctgccccaaaattgagaattcgggaatgactacttttgttttctgtttacatacaaacacctaatgagcctgacaaaatggagcttagggatccgagtttctgatttcaaagtcttgcatttgcagctgtcatagggaatagtagtattctagttatttttaaaacaaggtaatgttagggaaaatctaagtcttgaatcattatacatgcttaaaataatcaccattttataaaatgtagaattatttacatgttaaaatattttcattcattaagcctaaaaatgctgtgggaagagaggataatagttatattatgtgatgatctaacatttatttgaccccattgtttatcatggatctttcttgactttattttaaattaaaaattacaagtgctctgttcttggtcttccttttgcagatgctttaacagttcattcccagttcattaggttttccaaagagagctattgtgtttattcatcttcagcttgtgcatttctctgaatttcagttgttttggtatctctctagatcagaacattattcttgaaaaacaagtatacgtacatgtgtatatgcaaagaacaagcttgaacaagcagtaaaaatgaagtaatgcacttctaagtgttgatgttttataaaatctaatagatttgtatgtctgctttttcattcatgagaattctataatttcatctgctttgttgtaattttaaaatttctgtgtgtcaagtaatttaccaaagtttcagtatgatagtatcatagcaaatgttatttcttaattctaggactatccaaagtaggtttgtttgcataacagtttagcacatttgaaatcaccaaataaagtatttgttgaatttgatttacccatggcattatccatcttaaatggtgatttaactgttatcttttttcctaattcacattttaaaacatgaaactctaattacaatattcatgataactttcatagctaaaactatataaacctaggttcttttaaaattttaatttatggaacccctgcagatttaaacatgaataaatacaaagaatagtagcgcattcttattgaatgaatatacaaatcctggctctcatatttaatattgtgacctctttggttcaggaatttaatctctcttttcctcagatatcccaatttacagtataagatttattagattatatgaataaattaatatgatagaactttatataggatacttttatctctgcttttgtttgctttgacaactattttgaagaacacagtgacaaatatctgagattcaaacaatctaaactcattgtatcatatattatgtattttgctgctttcctgtctcttttaaatttactgatttaatggatttctctttgatcattacctagtcttgcatggttctagaatccttgcttatttggccatgaacaggtcattagtcatcattttttttctttttagggagactaccgtgggctaacattaaaatcaccaactttcagcaattttccttttttagaaaattttcaaatacagacatttaaaaatctgtagttaagtcttaagatatttcgtgagggtttgtgatctggttaatggaaatgtacaccttcatgttatagtgttttataaaacatattcatatataatattaattatattaaaatctgaagaaatttttatttggtaatatttgtatattatttttaaatcttgctcttacagccttttgacttttcaatcaatgaattttaatgagtaactcaaattcgtttatttgcttatggctggagatttagattttagagtcattttatcgtcagaataacattttaagccattaaagtgaataaaatattccagggggagaacatgtagaataagaggaaaagtaccaaagataagatgttttaaggatgagcaggggtagtaaaaagtgaaatctgtggagtatgaaagtatgctaaggtgatagagttgacttaagatactttcatttgatgtgttcttaaattggagagccagagagaaaactgtacatgaaagtgaaaactgaaatgaaatgaaagtgtaaactgaaatgaaatgaaagtgtaaactgaaatgcaatgaaagtgtgtacagaaaaataataacactagagaaggtgatttctgttccttgtttgtccatagaggccaaaaagccattcagttgttagcagtgggagattaagagggagacaaatgtctgggctctgtggctcatgcctgtaatcccagcattttgagaagccaaagcaggaggactgcttgaaagcaggagttcgagaccagccaggacaacgtagtgagacctcgtctccatacaaaataaaaaattagctgggcttggtggtgtacttctgtatcccagttattcgtgacactgaggtgggaagatatcttgagcccaggatgtcaaggctgcattgagccatgatcgtgccactgaacttcaggagtgagactgtttcacacacacacaaaagacggagacaagtagtctgatgggattggttgacataaagaaccttaatgaattgtacctactgaattcttcatgtattttctagcctgaaattttctcatacaattgtcatatttacagagcattctgttgtcagctggatttttttttatcgtgtctaatttctgtgttatggagacatttcatctctttatctcagcatggtagagggaggttgtgttttgtgattaaagcactgacagcaggagctgtggatgctagttcagttaacgaatcttgtgttttttgatagactttaacctcactgttccacagggtcttcatcttctcagcatgtttgataaagatgcttgcttgccctgatatattaggtttgtagtaaattctaaaaatgagagatctgtgaaaaatttttataattaaaattgttactgttatggaaatcatagttatttcctgcagaatcctgatatttcacttgttttagtggagaattttgttttttttttttttttttgaatatgcataagggcctttacggacctggtattaatatcaattgagaatccctttgtttaattaatttcatattttttatttagagatggaaatttgttaataaactgtttttccccttttgatataatacataataatttacttacatatactgttttcttttatcgaaagtggcacatattccaaatctggacacttggaaaagtgtgatagcttgctttggtgaggatagaaattttgggcattgtatgctacttgctttattgggatacatgtcaaattttctgttattgcgctatgtcttaagataggtgcttcagcttttgtgtttgtaaaattgttattatttcccgaagaagttcacaataataactgtgctgaacagcatggaatgataattttaagaagtatgagggaattcaatccagaacatacgtgagttatttcctaaatcctgaggttctaagtctctgtttctcaaagaatggcacctcattctcagcatcactggggaacttgttacctatgcaaactgtaaagccctatcctagacctactgaatcagaaattctagaggtgtggctaagcattgtattttaagccttccaggtgattctaatgtctgtgaaagcttaaggatcactgccctcattgagtatttacattatgttacttaaaatgcaatttaaatactactcttgtatatatgaaaagctaagtgcaactcattccccactgaaaaggtcaattaactgctcttgttccattaatgcagagatttgtcatatagttatagaggaattgtataaaactgagtgcgtaccaatgagtaactggaagaatgttaaacatctttggaagtcagtttttatgtaagagtttggatagaacaaacttttaaggactaccctgccaaagtagtaaaggggatggtaaatattatgaaattaattgaatttatagcagcagttagggactaaaaggggatatgctttccctggcaagatcatctttctgtttaaatgcaaactatagtaacaaaatacaaaatatagtttaccactattcggtattcctcatgaatttttttttccttgaccaattcaaagcatgggatatgaagagatgtggcatttagggagtaggggaaatctgagcttagatgtctaaggaaggaaagtaccgtattaggaaacatggatatggttaaatgcatgtgggaataaaacttgagtcatctgtggtatgaccatttgataatgctgtgatgtatttgcactctaaattccatcatttgttagattaaattcttatttgtattgtacgactccttcatagatctttcaatgaggaaatagtggaaatattttggtggtttactatcttaacattctactgaatgttcagagtctgattctcacactttggaaagtggtacatatcctcactgatggggaagattttaacaaatgcccattacggtacagcagatacttcccagctggtgacctattttcagatactacattttgtttctgtggactgtcataaatttaattccagtggtgtaatatttaaagtgtcgttatgcatataatttatgtaacaatttacagttttgaagtatagttgacccttgaacaatgcattaataacatgaacagccgattaatgtgtcttttgtatatgtattatatactgtattcttaaagtaggccagagaaaagaaaatgttattaagaaaatcataaggaagagaaaatatatttactgttcattaagtggagtggatcatcatacaggtcttcatcctcattgtcttcatgttgagtaggctgaggaagggttggtcttgctggcttgggagtggcagaggcatgtaagtggacttgcatagttcaaacccatgttgttcaagggtcagctgtactttcaaatgtgtcatatagttaccatagtaatcctattagatactaattactgctttccacttaaagatgataaaaatactcagttacctccttaggggcactttaattgtaagtttctcatcatggtttgagggtgtataaagtcagcatagacttcgttacctctgtccttgattgtcagtgattgattccaggcattaccctggtattgtacatgttattttaatcctcacaagaatttgtctcaagaggtagcattgtcctcatttaaagatgaggaaactaaaggtcaaaggtagttagcaaagtgggcggtggctaataatagctcacacactgaggtctggctacctgagtttttgtctaagctctgccacttaaatctctatgactctgaacattttctcaatctccttaagtctcacctttctaatatattgaaataacagtgtcagtctcatagaactattatgaagattaaataggatataatacgtggaaagtgctaggtgtacagtgtgtgcccaatatcacatatgagtactaagtaaggtcactccaatggtaggaagcagctcttgtgacagtgtctcatgtcactttcttactcattgttttctttctaatcagcacaagcaatatatacatgaaaatgagtagtattgatagagcctctagtaatttactaagttagaggtagtaggcatgagagcaagaaatagaagaaaaacttcatgcaggggtagacattacatagtttaggctgaaaggccatgacataaaatgtttcctgaaaaagcacagcagtgtttttttaaatgattttaaaagtccacccttctcagactcatctttgcacaatatttacttcaattatttaccagtgattaaccttaaacacaagagcaacagaaatatttgcatatttgtttttggtagaaacctccagtgatcattccgccaaatgaacttgtcacttttcctacttatgtagtagttacacatattatctatcatccttccaacatttggaattataagcattgttgtttagaaagaatttgttctttttattttttctctacttcaagttcctgtaatactttaattaaaccctattctggtacttagtatttttgacattgttttctagttatttccatagcttatatcccctacttaaagacagggtctgactcaagtgtctaattacattggctaatactcccagtacaagcccaagaacaaattataaattactctaagatgaatggtctctttcattgcttagtcatcttctcagtgatcaagtagttatctcttaatatttatgtttttctactgccagtgactctaggtggaactaatatcaattgtgttgattaaatattaattttaagagattccaaacaataatttagatatataaagtctgacactgttattgtccgtttttaggcttatttcataatgtaagggtttggctttgttgttttctttttaaaagcaagtgttactgatgcttcataccagagcttttagaaaagtaacagaatatagttgactctgacgttgtatggttttagtgcattcaagcaaatgtggccattagtaagcaagcaacaacataacttaccgaatagaaagggagaaaaggccattctctcttctgccattctctctgtgtacagattaaacatttcctttggtcttgatgaactgttaggtcagtttacctcaaactgttttttggcctaaggaaatctgttctctggccttttgaagttacattcagagaccgtgcttttggctgtttcttgcaaagagatatgttttaacttctgcaaaggccagaatggcatgagattctggtgtgacacattcactgatgatttaccagaaaatacactgcaaatatgaaagactgcagacaggttttatatgtggaactctgctcagactgagagaaagtctagttattagtaaatctctagttttttcagagctggattattttgtcacataaaaatatagtgagataaatgttaagaggactgccagagtcagttttatttaatggtttctcttattcaaatatcacaggttaaaagaaggtcagaaagtggcaagtatctaaaagattatgctttataaccaagcaatccataagctctgagaaatatttctactaattacagctactgtttgttgaacagtattgatccactatgtgtcagaaactttacatatattctcattactcttcacaacagccctgcaagatgtgctttaaaatttttttttttaattaccacctcacatattaggagacaggctcaaataactcccacttttagtaaatgtcagaggtaaggtttgagcccaattctgtcagttaccaatatccacatgcttttaagtgagataatatttgaaagtgcttggcaaaatgtttaagtggtagctgttattatttctattcagctgcgcttcctcccagactataaatacatacataccacacacatacacacacacacacacacacacacagtgaggaaaaaaaagaagagatagcattataacatgacacctccaatagtaagcatcctatcatgccatcagactttccttcacatatataatccacaagcagttaaaagctataccggaaaagccactttacaagatgtaatacctaggagtaaatataaagatacctgtgcacatcttttttgtagacaactttaaaacattctagcaggacaaaatatagacttgaacaaatggaaagaaatgtatgttcttggatagaatgattcaagattataaagacattaattctccatgagttaatttataaatttaacatgaacctattaaatagtcacagtaattaacagtttttacccaaatgctggacaagaagattccaaacatcagaaatccgtctctcaataaggtgtatagttgctttttttctcctcaccaccaccagttccctaatatttcaataaatacataaaaatgttggattcatttttataggttacattatggagaactttagtctcctaagaaaggaggtaggagtggagaggagtgtttgtaacagtgttgtgcagttctttgaaactcctaagttttgtgacaaaattatatcgtgaactcatcaaaaattatttttaacaatctgtcagctgacaacttgactaaacccttcagttttgttactagcatagaataaggagctacccactggcaacaggattacttacctagtatttattatttaccttgttttagccaaatactaaaaataccagtggatgccagtatttcaaattgtctttgtttggtgttcagaagttttctattatagctctttactcttgcttacttttaaaatcattgtttttcctttttttccatagttgcattaaaatcctcccctactgaaagaaacggaggccaggataactgtagagcagcaaatttcagagaaggcctgaacttacaagaaggagaattcttattacaggtaaattttagtaaatatagtttcttacactaaggacagttgtaaatggaaaatgaattaataagtcttttagtaattccctgtttacttaggatttgctcaatgttttttgccactttcatctgaactgcgatagtgaatgatgcttaatacatgaaaaactggaattatagtcatgcaccatataatgatgtttcagttaacaacagaccacatatgcgacagtggtcccgtaagattataccatattttttactgtaatttttctagtttagatacaaaaatgcttaccatgtgttaaaattgcctacagtattcagtatagtaacatgctgtacaggtctgtagccttggagcaataagttatactgtatagcgtaagtgtatggtagactataccatctaggtttgtgtaagtacactctatgatgtttgcatgatgatgaaaatcacctaaccacatatttctttgaatgtgtccctgttaagtaatgcatgactgtatatgaagtagattagttagaagaccggtcaaccccttctgttgtattaatatttcttcaaacagcaagaactcctagagtattttagaggttctaatttaagatgttgaatttatatatatttttatggaatgtatctctattaaaattgttaaatgcatttcttaaatagtttaaaatagttcttaacccaaatttcattttgccaatatgttataacttacattttattttagcaactgtttgtgacttattaacatactaaagattttctcaacaactccaatccctatttttatgcttcagaatttagtttctaatttgtctatgaaagcattttgcatctttttttactcttttttttagaattgatgccatgattgattctcacttaaaattctcagatacttattttgttgaaaaaagatagaataaagatgtgtgccatgtgtgctgtcaccgctatgtgatcattatcagtttcacccactgaactgactagaaaaacttcaccattgttacaaaaagtaaccctaagtttcggtaactccactagttcattcagtggatggtgatgtgcctaataatataacatttttattacaattgtgtaatcacattcaaagtcctgttagcaaaaattaacttatgttaaacaaagtaaatctattaaagcatgagtcctcccctagccccaactgaggatcttcatgtatatgtaaacccaaacataaagactccttattcaggtcataggaaagcattttaataattgctatttaagatgattaaacacacctcttgggttttctactaagggcctaatgaaatcctgtatttcaggtgaaatagacagatatgtactgattgacgtaacacttggcaagttggtttaaattatgggccatttttatttttttcccaaaacatttaggcaaattgtgtacataccctatgtcagggaaacagaataacaataatatgaatgcaaagctgtaaagctataattatatggaatatatatattttaaattatctgcaaattggtaacccttaagaagttaaaataaacttacctgtttatattgaataccatttgtagattgctcttttaataggaagactcacattctctatgattttcttaggattgtgcttatatgttatctttttatgaagaagatgactaaaaacattatagatatgtggaaatggctgtttgattataacaattgcataatgacatctgactttatattgcaaccgacggttatcagccaattaccactacagtgtgaaaggtgttaccagaggttctgtataccatatggcctaaaacttttgaggagaaatattttcctttgcttaacaaaggcatatgaagaaaatgttacaaaaatttttattaaaggccaggtgcggtggctcacgcctgtgatcccagcactttgggaggccaaggcgggcagatcacgaggtcaggagttcaagaccagcctggccaacatagggaaaccccatctctactaaaaatacaaaaaattagctgggtgtggtggcgggtgcctgtaatcctagatacccaggaggctgaggcccgagaatcgcttgaagccaggaggcagtagttgcagtgagcagagatcacaccactgcactccagcccgggtgacaatgcgagactccatctgaaaaaaaaaaaaaatttattaaaagtttaagacatctttctaggttagcttcaatttattactattttacaaggaataaaaatgaaacaatgtgaataactgtgtctttatttacttcacatgtttatttcataagtttaaaatatatctcttgctatttaatactgtattgttaaaatcttgcagctttgtttttcagtgacaggagttgaaattttatataacagtattgcagtttctctgaaataataagtgagcttaacaaaattttcagataggttgagtgaatctttgtgactaaaagaatgatgatctcttttatttaattagcatattaattccttctgttaatttattgagagaaatcaatacaagtaataaccttgggtctcctggtacttgagatcatttgagatatataaaaattgatgtgcatctatcgtttctagatttttatttctgataataacatttgtctaaagagatttgataactgtacttaaattatccttctgtcttctggcatgtacaccaatgagtttattggaatgtgactaaatttgtttcactgtttgaaaaagtatgatgttctacaaaataatatgaatgtgatcaatggataatcttccctagaagcagatattttcaggatgaatcagtgcaatgacggatatatagtgttactgccaagagaatttaagaatatccaattttgaatgtgttaatcattaactattcaagttcttatgggtagaatcaccattgtttatcctaagagaattgccaggtattacatatcatatttgcagtcaaaaacctgagagcctgcttgtggttaaagggacatggatggagccggaggccattatccttagcaagctaccacaggaacagaaaaaccaaataccacatgttctcccttataagtgagagctaaatgatgagaacacatggacacacagaggggaacaacacacactggggccgtttagaggctgcagggtgggaggagggagagaggatcaggaaaaataactgataagtactaggcttaatacctgggtgatgaaataatctgtacaacaaaccctcatgacacaagtttacctatgtaacaaacctgcacttgtaccactgaacttaaaagtaaaaaaatagaacaaaacagtcagaaccatgcaccaatttgggatcgataacacataaaggcagcatatcatgttatttaagtgagtacgctttggagccagactgaatttatctcctggatcagccattttctggctatgtgaccttgggcaagttacttttaaaggtatagtccttgacctcagtttcttctattgtaaaactggaacatggcacttacctcattgggtttttgggagaagaaaccactcaaatacataaaaacatttagaaaaaggaatactaaataatagttgttatctttgtagtcaagttcttagaagtataatatagatcaagaatcttgaaggtggaaagtaattggagtggaaagagagacagtcactgtatttcatttatttcatctgataatgaagatatcgactggactatatgtgagcagcataagcactagggcaaagacttgttaactcttaaatcccagtacttagcatacatatctcctcttgggtatgtaatagtttattacgtgttgaataaatgaatcactattatttatatagctctttatagttctcaaagcatggtgatataaatctttatttgctcatttctacaaccatataacattgtaccttattacactgagtgctggctctgtgccaagcattgagttaggtgggatatcgtcattatatctacctgatgaagtgccagtttttgaaataacactgaagcctaaaaagcagtaaatagcttaaccaaagccacacagctagtaatagacagagacaggagtccagaccaaatctgtctgactacacagtacaattcttaaactaaaccatactgtgtttctccttacatgaaaaacagggtgttagaagacattagctgtgatcacatagtaaagaatagatcaagtaccaaattgaactcaaggagaaaatagtgagggcttgtagaattaaaatatatgataataataaagtgatctatgatactattgttatccaagaggagaataaaggtattagttgatattggacttgaattatccagtaataggaaaagaaactataacatccaaactaaagagtatgggctaataaaaaataatggacccaaagtaggcaaaacagagagaaaaagaaacattatacatgtgaatgtgctgtgaacaaatagaaataacacatataaaatgataaatttaggtatgtgttcataatgacattaaattttagtggactaaattcactgtatgcttgctttacatgtgtattatagtttaattacatgtatattttatatatatagtgttttcctgtaaaagtcttaaaatgttctgtgacttaaaatgttagcatcagtgcttgaaatgtctttgtacaagaagagttttctattaatgttcccagtttaagaatctaatcaacatctttgcctcctgtttccctctaaaaaaaagcagtgtgatagactatagtgaatgatgtctagtttgttttttaaaaaatatatacaatatatttaaaagagaaaatctgaaacatgaagaagatgaattccatattctaccaaagttattctgattgagcattaaatttagccatttttccatagacaaatcaaaaggtatgaatagatatttcttagtccaggagtgtatgttttggctgtgtttgtgaaatgtgacaattttaactattttgaagagaagaattttcagagataaaagtaataacctttatctgatggtcaatattaagtcatattactaattttagaacttcctttccttgtaggctctgaatggctttgtattagttgtcactacagatgctttggtcttttatgcttcttctactatacaagattatctagggtttcagcaggtaagtatatattatttatatcatttatattattatatcatttactttttatatatatttaggacacagttggccatttgtatgtataaagtatcaatatatgctgtagaatacagtatgtatttgtagctaataattttttctaatattaataatttactgcactataattcctttaaacctttatgtgattcatggttactgtgtttcttctttcgcttatcaagaatcttatatataagaaactttcaggcacgtagggtctaggggagaagatacaaaattatttgctatcaaataacttatggatagcagaggatatatgacaactatgaaatgaatgagatgctgttaaaaagtacaagtaaaatcctatgatttatacctttaattctgatttatttggattatggaagttaccctaaatcaaatggtatgtaagctgacctaaataatgtgtaacaggtgggtggtcaagaaaacataggaatattgaagtactgtaagcattagactggaagtcattgaaggaaacagacgtgtctgacttgtttgatgttattgaatgaacagtgaatagatggaattataaatatttgatatattggaaggacaagaacatcttttatggtttgagaacagattgtaacatttgaatgcttgctattctcatatatctggttctcaaattgtactgtgcacaagaatcacctgaagaccttgataaaacttggtcatccctgtgagccccattgtcagatattctgaatcagtagttcacagtggggcccatgaatttgcatttctattaagctcacaaggctgctggtcttaataacagttatatagactagagcttcaactatattatatacccagtggaaaccactgaagggttttgttacagggggtgtgtatatttcaacttgtgtttcagatgcaactttcggaaattgtgtaatggttggcatcaagatgatttaatactagaagattaggttcctaggaagatttaagtgtagatgactaaagtagtggtatctagctactactgctaccacaaagtctaaactcctgatttcttgcattctaaagaaaatacattaatgtccatagaaaagcctgtttgaagcctaatgtattatataactgtcttaatcaggatttgatattgtgatttatattagtaagaaaatcagagagattagccattttccaatccatttttttctcgcatatacacatggatttttttcctaaaagaatattcatatctgacgcaagtggtagattaagacaccatttttaaaactgcaagttatgactcgctcatgggtatgcagtcgagacagtggatcactatcaaactgttttttagttgtttaggatagaataaaataatatagaatacacagtgttatctcatgtaataatggtaagtgttttgtgaaacttttccatgtgtttatgtctgtgcacacacctgtgacagatggaaatgtattttttatcataacttgcagttaaaaaaaaaggaaaactctggtttaagcactaaggactcagcaccgtagtaaatggtgagaggcaagagaaggaaagtgggtttaatatggtaaaggcacaatcccttgctcttgtggagtctacttggagtgaaaattttatatgaagaaaattttagagaacagtgaaggaaatacataaagaataccattaagcttagagaagtcaaagaggcctggggtggttaggaaaagctgcatggaagagataagaatctaaaaactaacaaatgaatatggaacataaacagattttaatatgttgcatttaaggaatggggatgtgacttatttgagcaagagcattcatgttgggaactgatgacaagtaacttttggcttatctgttgtagtgccagtctctttagctttttctaccttaggttctatcttaggtgactagggaattttaggaatcattcaattcgtattcatcaccactagcaagcacccactaatctaaataggctttaaaattaatttagccatattttttaatcagtccttttgttgtattccttgtatcttttttctttagtctgatgtcatacatcagagtgtatatgaacttatccataccgaagaccgagctgaatttcagcgtcagctacactgggcattaaatccttctcagtgtacagagtctggacaaggaattgaaggtaagaattgatggtacaaaaaatagtgttggtagtttttaaatatgagtctgtgaaaggaggctgggaacctgtagggtcatagaactccatgatagggaagtagtggaaagatgtaaagtctgcaatcataggccacagctaggtcacaaagagcctgatgagctaaggaatattttggcaaatgagagccatttaatgagtttcaggcaacagagtattgccatagtcagtaatgtattttataaaaataagtagtaccttcatgaaagatggaaggaaggtacaaggttgatacctgagtgcatgtaaattattgtgtttaaaatgcaccaaagaaaaaagtaagctagcatatgcaagtataaaaatgcttttctcaatgcaaaaaatgtttttggaaatttgttaaagtgttaagaaaacaaaaatgcattagaaaatatgaaaattgttgacagtgatagctcaataaaaatttaaaaaattatgcaagttctatctgataaaagtgatatttaataaacttttagtttcttgtcattagctcttttgaaaatgatttttttgtattcagaacacagactccagtttagaaactaatacaaattttacctattcaagtgcttaattttacagcaaaatggaaagtaaattttgttttgcctttatttctacagaagccactggtctcccccagacagtagtctgttataacccagaccagattcctccagaaaactctcctttaatggagaggtgcttcatatgtcgtctaaggtgtctgctggataattcatctggttttctggtaaggtacaaaattttatgatactggcttttactattgttacaataaaagcttgaggcaaatttaatttagcaaaatataattcagcagagaactattcccaaatcaggcaaccctcagaaccagagagcttcagagagctcacttaaaaacatgggctggagcatttatgaacagaaaatgcaagtgaggtacagaaatggcttgattgattacagcttgggatttgccttatttgaagatgatctgattagttggccacctgtgactgactgagactcagctatttggttacaaaagtttaattctactgttaggctttccgttagcttatatagtaaatgaagttgcaattccttggtaaggacttaaggagcagaggcatcttcagcccaaatttagtttaacattaagttatagaaaaaacaagccaattttctttggttatctttgatttcagctttaaaaatctgctaccaaataatttgataaaggaaagtaacattttaaagtaattatttctgattttgactatcttctataactcagaaaactgttctttaggatatagtaacaaaaattgagtgaaataacacgaagccttgtattttgactattttaggatttttaaggtatgagagaattatgtagcccttttttaataggaggatgcttaccatcttgggattgaatgcctgctagacagagaaattatggcctttccatatgtctcaaataactgccacatagaaaaacgattgtatattcatgattgtggaatcatcatttgataggagatgctgttttcttgttacaaagtctgaacacctgcataggagttgactgtagggagcagcttaggattcctcagagtggacttgtctgttatctcattgtatccttagctcatgttaccaagtacaggagaagaaaatacaaagtatattgtatattctttttgtgaataacaaggaatttgaaacagataatcaaatcttaaattaacattaccaagcaatgatttttgtttatgtgtttatttctgaagaggattttgctgacccagaattagaattatgctttgagacagttttcccagtgttattgctcatgaacaattagtatgtagagtcatgtcctgcataatgatgctttggtcaataacagaccatgtatatgatggtagtcccatgagatcataatggagccgaaaaatccctatcacttaatgatgtcatagcattgctcacatgttgatggtgatgctgatggaagcaaacctgtgttgccagtcatataaaaagtatagcacatacaattatatatgatacataatacttgaaaataaaacaataataaatcactatgtatttactattaatcattattttactttatttttaaatgtattatacttttaattattttattttaatcattattttagaataaggttaactgtaaaacaggctcaggcaggtccttcaggaaatattccaaaagaaggcattgttatcacaggagatgacagctccatgcatgttattgcccccgcagaccttccagtgggacaagatgtagaggtggaagataggatcattaatgatcctcaccctgtacagacctaagctaatgtgtgggtttgtgtcttagtttttaacaaaaaaagtttaaaaagtaaaaaaattaaaaattaaaaaatagaagaaagcttatagaataaggatataaagaaagaaaatgtttttgtatggctgtacactgtgtttaagtgttattacagaagagtcaaaagttaaaaatgcaaaagtttatgaagtaaaaatgttacagtaaactgtgctgggattacaggcataagccactgcacctggccaaaaggaaaatattttttataaattcagcgtagcctaagtgtatagtgtttataaactctatagtagtgtacggtaatgtctcaggccttcacattcactcaccactcactcactgactaaaccaaagcaactttcagtcctgcctaccttgtttacaataagtgctcttatacaggtataccattttttgtcttttatactgtatttttactgtatattttctatgtttagatacacaaatacttaccatcatgttacaattgctttaagtattcagtacgatagcatgctgtacaggtttgtagcctaggaacaaaaggctatactgtatagcttagatgcgtagtaagctataccatctaggtttgtgaacctaccctctgatgttcacaggataatgaaattgcctaaggacacatttcacagaacatgccccttttgttaaatgacatgtgagtgtatgtctgaggtggaatatctgtgtgcaggagggccttttcctccttgtgctgctattattttgatgtcagaaccatcccttggactggttgatattgttttaagcaattaaatatatcatgttcatgtttaagtgcctttgttttccctgtcttctaaatttcttccatatctttactcagtagggctctgcattctttatatgttttcatgatgattcattttagtgtcttaataaaattatattttgcctctatagaaaagattatgaactatgcagtatgctatgagctgtgatatagttcatgtatgcttgaaaatgaatgtttactttaggactttatcaccattcaggatatattgattgcctggtgtgcaaggagctgtgtgaggtgaaaatgatagggtaatggcaagcttggaaaatgatataggttttcatgttatgaccattaggaacaaggagtggttcacttatccctttagaatatttttcatattactctttgagatagatttaatgggcgtcccatggagagaggagtgaaggaaactaacagttctcagcttcaggaatatttatggaattatcaagaaccctagaggcagccataatggagccttttaaaaaggcactattttatattgttaattttaatgaacttttttgttgttgttgcttttttaaggcaatgaatttccaagggaagttaaagtatcttcatggacagaaaaagaaagggaaagatggatcaatacttccacctcagttggctttgtttgcgatagctactccacttcagccaccatccatacttgaaatccggaccaaaaattttatctttagaaccaaacacaaactagacttcacacctattggttgtgatgccaagtaagtgagactttttcacttttattttattggatgtacattatgtttcagtaagtctctcttagcatgtaaaacatacagtgtatgtaatattgtttattattagattggctattatcgtacattcttccagtgtagccttttacagtaaaataatttaatcaggctcacaaatcatctttttaatttttgcaatacttgtctcaaatgatgatgttcttatatattagtaaggtttattcttctgatgacatttatgttggtttgttttacatttttaaatggcacaaatgttatttgatttctagccccagaagttttagtaactttcagaaaattgtgagcaggagtctgatattaaacatttatatcatatcaaacatatcagtgcttttctcctttctaatgtgggaatgcagagaggtaattagaaaaaccttcttccctaaaaatagattataaaaacattccagatttttattaaagatgttctgttacccatacatctgctctattagattcatttttagcatactaatttccatggatttattcaggaaaagaaaataggctgaaactgaaatttgcaatcataagcaaagaagatcagtttacatggatgtgtttaatttcacatctacttatgtgaaattctaaatgtgaactaaaacatattgcagaaactagcgtaaaaccaatgaatttatcttggttatttcatttatgttaaatcttaatccattcttattttacctttttttattttaaacagaggaagaattgttttaggatatactgaagcagagctgtgcacgagaggctcaggttatcagtttattcatgcagctgatatgctttattgtgccgagtcccatatccgaagtaagttgtagttccttatgaacatgtcagaagaaaacggcatatactgttgtacatgtttcaaattcttacgtaatgtaaagtgtttaagtaaagtatatggataaacttctacttagtaacatatcattatgattaaccagggttacactctttgttcattaacttgtctacacctgccatgtagaaatattgttgtttagttattaaaaaatgaccattttggcccatgaagttttgcttgggaattttttaattacatcgttatcaattcataaatctatgttaatattgtaacaataatagtgttaataattctagtttaaaattataaagtattaggctgtaggaaaatattccctatttaaaatgaaaataattttttccccaacttatgttctctctatactttcctgtgttactagaattgtttggtacataatcttccctttaacatttaaaataataaatttaaaacaactctgaaaaactatttccatgccttttattattttttgtttaaaatttattgtctttggggataaaggaaatacatccagaactatgtcacaagagctttgttttaggaataatctttactatattgatttgggggtttgataatttaattttttaattttattttagtgattaagactggagaaagtggcatgatagttttccggcttcttacaaaaaacaaccgatggacttgggtccagtctaatgcacgcctgctttataaaaatggaagaccagattatatcattgtaactcagagaccactaacgtaagcacaaataatgtttcctgttttaacagttttgttttcataagtcctcttatgtgaaagcataaaaataattcaagcagactttagtctgtaaataaaaattgaaaagtttaattcatctagaaagaagagcacaggtgagagacattgagaagatagaattgacgaacttgattgagagctacatgtgcagagctatagaaagaataataaaactctagggttttatcttgggcatatgaaagacacatgaaaagctagtgtcattggtaaaaaagaagaaaaatataacaatgctttatttagaatatattctctaaacccagcagtgattttaagagtttcttacacatgctgcagatgagtcctttatcaaatatttgtattgcaaatgtttcctcccactctggagaattgatttttgtctgtagcttgaggtaaggattgattccccccagccattatacgtatacccaattgaccagtaacattgaaaagatgatttaccgagaaggtcattgtttcccggctgcgctgtattttgatcaggggattttgtctgtggttctctgtctggattgtgttgttctattaatagctccattagtgcagttgtctattttgtctagcattacactgtcttagttattctatctttattatatatttctatgtcagagtgtgtcattttgtttgttttgccttttttgttctccttcaagattgccttggttcttctttgccctctataattccatatacattttagaaagcagttgtctgaaaatctgttgagattttgagtgcaattaccttgaaactgtagatcatttggggagaattaacatctttttaatactgaatctttgagcccatgaacatgatgaatgtatgtatgtgtataagtacccatggaagtacatgagtatgtgtgtaccatatgtatatgagtgcatgggtatgtgtgtacctctacaaatttgtcacttctcccttgatcaatgtttctagaaggcactttttttaattagattttattagtctttattaggatccaacttttggtttattgatttttttctattttatacatttgttttcaattttaattatgtctgctcattattattttcttccttctactttctttgggtataatttatcattttttgcaacttttaaaaaatatatacttaaacatatatatcagtttccctttaagtacagcattacaaccctcatcttttgctatcttatttttattatttaattgaaaatactggctaatttgtttttatttttattcatgaattatttagaaatacagtgttactgtactttttggtgtttggggatttttctagttgcctttttatgattgacttttagcttaattccattgtagtcagaaaatattctctggatggatttcagtttttttgaaatttgtggtgacttattttatgatctaatacatggtctatgttggtaaaatatcccatgtaatcctatgaagaatacatgttctgtagtttgggagtatcttatttttatatatcagaagtctagtttgttaattgtgttcatatttgtatacatttgttgatattttatgtgcttctgttagttactaagacattttgttttcatttattactgaaggggggcatctttttacatctttctgttttttttttttttttgagatggagtctcgctctgtcgcccaggctggagtgcagtggcgggatctcggctcactgcaagctccgccacccgggttcacgccattctcctgcctcagcctcccaagtagctgggactacaggcgcccgccactacgcccggctaatttttttgtatttttagtagagatggggtttcaccgttttagccaggatggtctcaatctcctgacctcgtgatccgcccgcctcagcctcccaaagtgctgggattacaggcgtgagccaccgcgcccggccctttttacgtttttctatgacatttttcttttataaattacatttgtatcatttacctgtttttctgttgagttgtttgcctctctctcagactctattggagctctttattatggatatgaaattttataagtatattaaattataaatacattatgttacaaatattttctttaaaaattctattgcccgaggcgggcggatcacgaggtcaggagatcgagaccatcctggctaacacggtgaaaccccgtctctactaaaaatacaaaaaattagccgggcgttgtagcgggcgcctgtagtcccagctactcgggaggctgaggcaggagaatggcgtgaacccgggaggcggagcttgcagtgagccgagatcgcgccactgcactccagcctgggcgacagagcgagactccgtctcaaaaaaaaaaaaaaaaatctattgcaaaaatacaaatactttaatattaagtaattttcatattattatgccaatctttgtctttatagctgctgggttttattatagaggttagttgtttcagattcttaactttctaattcctaatttttttatttttttattattattatttttgagacaggatcttactctgtcacctatgctggaatgcagtggcacaaatgtggctcactgaagccttaacctccaggctcaggcagtcctcctgcctcagactccagagtagctgaagactgtaggcatgtgccaccatgcccagctagtttttatttttttgtagaggtgagggtcttgccatgttgcccaggtttgtctcaaaatcctgggctcaagcaattcacacacatcagcctcccaaagtgctgcaattacaggcatgcaccaccatgcctggcccctaaattctcgtagtctgtttttatgtgtagatatttattccacacaaatttattatttttttctttttttgcagggtgtcaggtagggatgtaacctgaccatggaattaactaagttattttttaaaaattaaatcatttaaatatgcttgtctgaaaaacaattttatagcaccagtcatgagaataattgaggtgaaaataaaatatgtccctttctgaattcaattacaatgtattttgctttatgtttttcttttttaaattatttttattttaaaatgtttgatagaatttttttctaagacttttttgtacacaattttagagatgaggaaggaacagagcatttacgaaaacgaaatacgaagttgccttttatgtttaccactggagaagctgtgttgtatgaggcaaccaacccttttcctgccataatggatcccttaccactaaggactaaaaatggcactagtggaaaagactctgctaccacatccactctaagcaaggactctctcaatcctagttccctcctggctgccatgatgcaacaagatgagtctatttatctctatcctgcttcaagtacttcaagtactgcaccttttgaaaacaactttttcaacgaatctatgaatgaatgcagaaattggcaagataatactgcaccgatgggaaatgatactatcctgaaacatgagcaaattgaccagcctcaggatgtgaactcatttgctggaggtcacccagggctctttcaagatagtaaaaacagtgacttgtacagcataatgaaaaacctaggcattgattttgaagacatcagacacatgcagaatgaaaaatttttcagaaatgatttttctggtgaggttgacttcagagacattgacttaacggatgaaatcctgacgtatgtccaagattctttaagtaagtctcccttcataccttcagattatcaacagcaacagtccttggctctgaactcaagctgtatggtacaggaacacctacatctagaacagcaacagcaacatcaccaaaagcaagtagtagtggagccacagcaacagctgtgtcagaagatgaagcacatgcaagttaatggcatgtttgaaaattggaactctaaccaattcgtgcctttcaattgtccacagcaagacccacaacaatataatgtctttacagacttacatgggatcagtcaagagttcccctacaaatctgaaatggattctatgccttatacacagaactttatttcctgtaatcagcctgtattaccacaacattccaaatgtacagagctggactaccctatggggagttttgaaccatccccataccccactacttctagtttagaagattttgtcacttgtttacaacttcctgaaaaccaaaagcatggattaaatccacagtcagccataataactcctcagacatgttatgctggggccgtgtcgatgtatcagtgccagccagaacctcagcacacccacgtgggtcagatgcagtacaatccagtactgccaggccaacaggcatttttaaacaaggtaagggtgttatcaaactgaattaaatctttcagtgattctttttaccttatagacatgttacacattttttatgtcagctgattttaatcggttatctacagcattcatggagacagcattttttattatatctgtgactaccttttttttttttacaagcctgtactttttccagtatgttactaatatatcattcacctgattcatgagggagaaagatatcaaggaatgaagcaacatgaatgtgtccttaatataagatgacctaaattaccaggtgaaattagtttttagaagtattttgtttaaaatagataatttggtttattctttctggattctttaaaaattatatggctatttaaaaattcaagctttaaaaaacgtattgcaatttttaagaataatttcttcaaagctctatttttttatatatgtttgaaattgagttaaactcaaatttaagtgtgctttcttacaatgcctctgaaaccctagattaattatatccctggaattcagtcctaggcacctccatgttctctagctattcctccacattacctcccctatcctcatctcatcctttaaggtagaatggctttcttttctggctttcttaaaagaggtaactcagctggctttctgtcatggaaatcaagcttgatagtgcatttttgttgtttaaatgtgtcatcagaatccgtctggcagtgagcacactttaaatctaaaaatgatcacttaaaaaaaaaaagttaacataatgtcagtaactgctgtctctggccactcaggaatacatcatgtttgcatttatgctttttccattagaaaatatttagttcattttaaagtatatttaagtttagttttaaagaatatcttgactaaaattaagctccttgacccctgtttactctgtattagagtataataattaaaagtatgacctgaagctttatctttaattgtattttctggctttttcatacattttgcttgtctaatcgtatatgagctttttaatagaaaaggacagtgaaaatttttcttattccttacatccttcaattatattaaaattgaataatattcagttatagtccgtctcacaaaattgctatgaaagtatattttactcttgagtaaagcaaattgtacagaagttaattctgtaaaattacattttgaataaggagttgcatgagtaccacataagttctttgcagtgttttcccctcactacttttcactgcttctttgtaaataaccaaataattctatagacctacatatgttccagagtacatgttattgagctaagacactcaatattgagccactgagtagctgttcagcacttgaaatgtggctagtccaaattgagatgtgctgtgtgaagtacacattggatttttggattttgaagacttggcttgaaaaaagaatgtaaaatatctcatcttttattattgatttcatgttgaaatgattagttttttcagtagccgcattacaaaagtaaaaagaaacaggtaaaattaactttagaaatgtattttatttaatctactgtagccaaaaatttaagttctgtatgtggctcacattatatttctattggattacactgctgtgtacagtatgtttaaagagaatggtgacatgaattgtgttatgagtaatgagaaaaaatcattttaaactcaccattatctggccaggtaatactaactttttatttaaagaatttacagtgttgccattcattgaagatacaggttatatgatttttactatagattttatatatgttttggaggatctgtgaagtaattaacattttgattactgaagccagttatgtaggctttacaaaggtagattttatttgaagcaattaaggatatgattttaatctgttttaaagtttccagaacgtccactaactaaaatataaaggctctgtaatctataaaactctacagagctatacatcttcatgtccttcctttttatttttcttttttctactagcagttatagaaaccagattcattgcagtgtaagaaaacaagacagagcattttcttttggtaacttgattctgtaattagaactatgctttcagtagtattcattaattaaaagtatattatgaataagaaatcggttaagaaaatcatacctgtggtgtaatattttaggaatatttagaaacatttagaaaatcagaagctgccttttttggaaaagttttgcattccagtgtaagattcctgaatataatcaattcattgatacctataacttcaaacctggtcaaagcaaacctacttatgatagagaatatttaactgtaatttgtgacttgtgctgtttgacccatcaattcctacctgacccaaaggcaatctgaaatgagacagctgcatcactcatctgtaccatgttcaaaatttcctgtcaaattaatggaaaaacaggttataaatgcaactaatacataatatgtcctcagtatgtcttcactgtgtgaaagatttaaaatttagcaacagtaaaggaacttgaagtttacaactctcaggggtaagattttaaaaatacatgttaatgttatttactggcttaagatacttggaagatctattccaataagttgcatcaccatttttgttttcagtttcagaatggagttttaaatgaaacatatccagctgaattaaataacataaataacactcagactaccacacatcttcagccacttcatcatccgtcagaagccagaccttttcctgatttgacatccagtggattcctgtaattccaagcccaattttgaccctggtttttggattaaattagtttgtgaaggattatggaaaaataaaactgtcactgttggacgtcagcaagttcacatggaggcattgatgcatgctattcacaattattccaaaccaaattttaatttttgcttttagaaaagggagtttaaaaatggtatcaaaattacatatactacagtcaagatagaaagggtgctgccacggagtggtgaggtaccgtctacatttcacattattctgggcaccacaaaatatacaaaactttatcagggaaactaagattcttttaaattagaaaatattctctatttgaattatttctgtcacagtaaaaataaaatactttgagttttgagctactggattcttattagttccccaaatacaaagttagagaactaaactagtttttcctatcatgttaacctctgcttttatctcagatgttaaaataaatggtttggtgctttttataaaaagataatctcagtgctttcctccttcactgtttcatctaagtgcctcacatttttttctacctataacactctaggatgtatattttatataaagtattctttttcttttttaaattaatatctttctgcacacaaatattatttgtgtttcctaaatccaaccattttcattaattcaggcatattttaactccactgcttacctactttcttcaggtaaagggcaaataatgatcgaaaaaataattatttattacataatttagttgtttctagactataaatgttgctatgtgccttatgttgaaaaaatttaaaagtaaaatgtctttccaaattatttcttaattattataaaaatattaagacaatagcacttaaattcctcaacagtgttttcagaagaaataaatataccactctttacctttattgatatctccatgatgatagttgaatgttgcaatgtgaaaaatctgctgttaactgcaaccttgtttattaaattgcaagaagctttatttctagctttttaattaagcaaagcacccatttcaatgtgtataaattgtctttaaaaactgttttagacctataatccttgataatatattgtgttgactttataaatttcgcttcttagaacagtggaaactatgtgtttttctcatatttgaggagtgttaagattgcagatagcaaggtttggtgcaaagtattgtaatgagtgaattgaatggtgcattgtatagatataatgaacaaaattatttgtaagatatttgcagtttttcattttaaaaagtccataccttatatatgcacttaatttgttggggctttacatactttatcaatgtgtctttctaagaaatcaagtaatgaatccaactgcttaaagttggtattaataaaaagacaaccacatagttcgtttaccttcaaactttaggtttttttaatgatatactgatcttcattaccaataggcaaattaatcaccctaccaactttactgtcctaacatggtttaaaagaaaaaatgacaccatcttttattcttttttttttttttttttgagagagagtcttactctgccgcccaaactggagtgcagtggcacaatcttggctcactgcaacctctacctcctgggttcaagtgattctcttgcctcagcctcccgagttgctgggattacaggcatgtgccaccatgcccagctaatttttgtatttttagtagaaacgggtttcaccatgttggccagactggtctcaaactcctgacctcaggtgagcctcccaccttggcctcccaaagtgctgggattacaggcgtgagccactgcattcagctcttcttttctttagatatgagagctgaagagcttagacacattttgcatgtattatttgaaaatctgatggaatcccaaactgagatgtattaaaatacaatttttggccgggtgcagtggctcacgcctgtaatcccagcacttggggagggcgaggagggtggatcacgaggtcaagagatggagaccatcctgaccaacatggtgaaaccctgtctctactaaaaatacagaaattagctgggcatggtggcgtgagcctgtagtcctagctactcaggaggctgaggcaggagaatagcctgaacctgggaatcggaggttgcagagccaagatcgccccactgcactccagcctggcaatagaccgagactccgtctccaaaaaaaaaaaaaatacaatttttatttcttttactttttttagtaagttaatgtatataaaaatggcttcggacaaaatatctctgagttctgtgtattttcagtcaaaactttaaacctgtagaatcaatttaagtgttggaaaaaatttgtctgaaacatttcataatttgtttccagcatgaggtatctaaggatttagaccagaggtctagattaatactctatttttacatttaaaccttttattataagtcttacataaaccatttttgttactctcttccacatgttactggataaattgtttagtggaaaataggctttttaatcatgaatatgatgacaatcagttatacagttataaaattaaaagtttgaaaagcaatattgtatatttttatctatataaaataactaaaatgtatctaagaataataaaatcacgttaaaccaaatacacgtttgtctgtattgttaagtgccaaacaaaggatacttagtgcactgctacattgtgggatttatttctagatgatgtgcacatctaaggatatggatgtgtctaattttagtcttttcctgtaccaggtttttcttacaatacctgaagacttaccagtattctagtgtattatgaagctttcaacattactatgcacaaactagtgtttttcgatgttactaaattttaggtaaatgctttcatggcttttttcttcaaaatgttactgcttacatatatcatgcatagatttttgcttaaagtatgatttataatatcctcattatcaaagttgtatacaataatatataataaaataacaaatatgaataatatgttttaatgtaaattctttctggtccacgtaaaggaaattatttattctgtagtattataactatgttagatgagggcaatctacaatacttagggatatgttaagtcagtaattcataaacttcttatacaattttgccccccaatgtctgacctttatctggatataaaaaacactctcagtagcttcataaattaaaatgcttctgaaatgaacttttttaaagccctgtgttatcagtgtagtagtgtgtcttagattaaaatccaaaatcctattttaatattttaagaatatttctgaagaaattcgaaataacccttgttagctgtattttgtgcttagtttagaaaaaccattgcccaaacttagtatttctgtttaataagtataaatgatacagaagcctttggccttaaattcataactgttgaacattcatggaaaaccctgcaattagaattgattgaagaagaattcctgagaaaatgttttcattcttgtgacagttatttttctattagttttatatttgttctttacaattaggcatttttctcaactagcatatcataagttagcatcatacttaattctgaacattttagactaatcctgagtctttaagaattacataaaatatttagttttaactatttgatctgaaaaaaatcaagtaaaaatcctgataacctgagtgcatctctgcttgcgcttaggtgatttctgtcaccatgaatgactctagcttgtccaatttcaccagctctaccaaacaccgacccagggatgttggccactgacagggctggatgacatctctcatttctttcactgtctgcagatgaccttgcttccgtttttactaataaaatcaaggatatcatcctaagtttgtaccttcacctcagcaattcctctatccttggacttacctccagtatgtgaggaggagagtttcctgaactccagggttagcccccgtcctctctcgttctcatgcacacagcttcgacacctgctttctgagaggctctccttctctgtaggatttcctgtgaataggtcctcctccatcctggaaaaaaattacttgaacctgcactttcttctctattaaattacttctttaccttcttcctttgtaacaacagttttgatctcctgagatctggttttgttttccatccttccattatattgcagtgttgcggttcactaaacttcttaccataggctcattttctatggccctgcaaccaaactgattacactttcaatgaacttttttcttcccttccatgacattagttgtcctgtaagctcctattatcccttttctttcctttgttaaccactctttcctcctcccacctggcagcaggcttagttttgaccatttgtggctctttctgtacatactgtctaagaagaagtgattcaatgccttacctctgattgacatttgtgaagcaattctttccctgagagagcagcatagcatagccaaactaaacacacagactctggagtcagactactaggtataaatcctggctttgccacaaataagatgtcattgagaaggtttcttactttctcttagcctaagatgccttttctgtaaactaaggctaacagtacctgcctcactggattgctggaggattcagtgatttatataaaatcacttagctgccagtagccaaaactggaataatttgagcaactaaataagtgatgatagcattagattacagcacaaagaataaagtaaatatccatgaatccatactaatataaataaaatggttgaaaaataaatgggggagaaggagcacatctttcctatagaagaatcccaaataatattggtagctactatgccctctgatgcatgagcttagttctcctcccctggaaggatgagttagacttaatgacttgctttcaaggaatagagtacagacagagaagaaaataactttacattgttgaaatctggcaagcactactttaaccaagtaatcaaggttaacatcaccagtgaaaagtcatgttgatataacatgtattatctgatatgatactttgagaagtgtacatctcaaagctccctgattttcttaaaaacacatagtctaattatgacaaaacatcaaacgcaaattcagggacattccacaaaatttctgagaggattttttaaagtgtcactgtcacagaaagagactgaataattatcacagagcagaggaggctaaggaggcatgatgactgaacttaatgtgatatctccgattgcatccttcatagaaaaagggcattactgagaatctgcagaactctaagtctagttaatagtaccacatcattgttaattttttggttttgaccaatgtaccatggctatactacgttagaggtacctggctgaagagagtaaaggaactctatatccttttgacttttctgtaaatctaaaattattccacagtagattttactttttaataaaagtacagtttttattgccacatagcaagtatctttatgtctctcattactattttcctgtatcttcacaacctcctcttagttggaggtaaagctatacattgacatcagtccccattaactactgatttgacgaatatctttttttttttaatttaagttctggggtacatgtacagaatgtgcaggtttgttacataggtatacacgtgccatggtggtgtgctgcgcccatcaacccgtgatctacattagatatttctcctaatggtatccctcccctagccccccactggtgtgtgatgttcccctccctgtgtccatgtgttctcattgttcaactcccacttatgagtgagaacatgcggtgtttagttttctgttcttgtgttagtctgctgagaatgatggtttccagcttcatccatgtccctgcaaaggacaggaactcatccttttttatggctgcatagtattccatgctgccagttttcccaacaccatttattaagtagggaatcctttccccattgcttatttttgtcaggtttgtcaaagattggatggttgtagatgtgtggtgttacttctgaggcctctgttctgttccattggtgtatatatctgttttggtaccagtaccatgctgttttggtgactgtagccttgtagtataccacattctctttatccagtctgtcattgatgggcatttgggttggttccaagtctttgctattgtgaacagtgctgcagtaaacatacgtgttcatatgtctttatagtagaatgatttataatcctttgggtatataccctggaatgggattgctgggtcaaatggtatttctagttctagatcctcgaggaatcaccacgctgtcttccacaatggttgaactaatttactctcccaccaacagtgtaaaagcattctgatttctccatatcctctccagcatctgttgcttcctgactttttaatgattgccattctaactggcatgagatggtatctcattgtggttttgatttgcatttctctaatgaccagtgatgatgagctttttttcatatgtttgttggcagcataaatgtcttcttttcagaagtgtctgttcatatccttctcccactttttgatggggttgtttgttttttttttcttatacatttgtttaagttctttgtagattctggatattagccctttgtcaaatgtataggttgcaaaaattttctcccattctgtaggctgcctgttcacgctgatgatagtttcttttgctgcgtagacgctctttagtttaattagatcccatttgtcaattttggcttttgttaccattgcttttggtgttttagtcatgaaatctttgcccatgcctatgttctgaatggtattgcctaggttttcttctagggtttttatggttttaggtcttacatttaagtctttaatccatcttgagttaatttttaaataaggtataaggaaggggtccactttcagttttctgtaccattggtgtatatatctgttttggtaccagtaccatgctgttttagttactgtagccttgtagtatggtttgaagccaggtagcatgatgcctccagctttgttctttttgcttaggactgtcttggctatgcgggctcttttttggttccatacgaaatttaaagtagttttttctaattctgtaaagaaaatcactggtagcttgatggggatagcagtgaatctataaattactttcagcagtatggccattttcacaatctttactcttcctatccatgagcatggaatgtttttccatttgtttgtgtcctctcatttccttgtgcagtggtttgcagttctccttgaaaaggtccttcacatcgcttgtaagttgtattcctaggtattttattctctttgaagcagttgtgaatgggagttcactcatgatttcactctctattattggtgtgtaggaatgcttgtgatttttgcacattgattttgtatcctgagactctgctgaagttgcttatcagcttaaggagattttgggtgagatgatggggttttctaaatatatgatcatgttatctgcaaacagagacagttttacttcctcttttcctatttgaacacactttatttatttatcttgcctgattgccctggccagaacttccaatactatgttgaataggagtggtgagagagggcatctttgtctcggcctgaaattttctttttttgttgtgtctcagccagcttttgatatcaggatgatgctggcctcataaaatgagttagggaggagtctctctttttctattgcttggaatcgtttcaaaaggaatggtaccagctcctctttgtacctctggtagaattcagctgtgaatctgtctggtcctggactttttttggttggtaggctattaattactgcctcaatttcagaacttgttattgttctattcagggattcaacttattactggtttagtcatgggagggtgtatgtgtccaggaatttatccatttcttctagattttctgttttatttgtgtagaggtgtttataatattctctgatggtagtttgtatttctgtgggatcagtggtgatatcccctttatcattttttattgcgtctatttgattcttttctcttttcttctttattagtctggctagcggtctattttgttgatcttttcagaaaaccagctcctggcttcattgatttttagaaaggttttttgtgtctctatctctttcagttccgctctgatcttagttatttcttgtcttctgctggcttttgaatttatttgctcttgcttctctagttcttttaattgtgatgttagggtgtcaattttagatcttttctgctttctcttgtgggagcttagtgctataaatttccctctacacactgctttagctgtgtcccagatattctggtacgttgtgtctttgttctcattggtttcaaagaacatctttatttctgccttcattttgttatttacccagtagtcattcaagagcaggttgttcagtttccatgtagttgtgctgtttttagtgagtttcttaatcctgagttctaatttgattgcactgtggtctgaaagactgtttgttatgatttccgttcttttgcatttgctgaggagtgttttacttccaattatgtggtcaattttagaataagtgtgatgtagtgctgagaagaatgtatactctgttgatttggggtggagagtttgtcttgcagatgtctattaggttcgcttggtctagagctgagttcaagtcctgaatatccttgttaattttctgtcttgtttatctgtctaatattgacactggggtgttaaagtctcccagtattattgtgtgggaatctaagtctctttgtaggtctcttgctttattaatctgggtgctcctgtattgggcgcatatatatttaggatagttagctcttcttgttgcattgatccctttaccattatgtaaatgcccttgtctcttttgatcactggtggtttaaagtctgttttatcagactaggattgcaactcctgctttttttgctttccatttgcttggtaaatattactccatccctttattttgagcctatgtgtgtctttacatgtgagatggatctcctgaatatagcacacggatgggtcttgactctttatccaatttgctagcctacgtcttttaattggggcatttagcccatttacatttaaggttaatattgttatgtgtgaatttgatcctgtcattatgctgctagctggttattttgcccattacttgatgcagtttcttcacagtgtcaatggtctttacaatttggtacatttttgcagtggctggtaccagctgttcctttccatttttagtgcttccttcaggacttcttgtaaggcaggcctggtggtgacaaaatcagcatttccttgtttgtaaaggattttatttctccttcatttatgaagcttagtttggctggatatgaaattctgtgttgaaaattattttctttaagaatgttgagtattggcccccactatcttctggcttgtaggatttctgctgagagatccgctgttagtctgatgagcttccctttgtgggtatcccagcctttctctctggctgcccttaacaatttctccttcatttcaatcttgatgaatctgatgattatgtgtcttggggttgctcttcttggggagtatcttcatggtgttctctgtatttcctgaatttgaatgttggcctgtcttgctagtttggggaagttctcctggataatatactgaagagtggtttccaacttggttccattctccatgtcactttcaggtacaccaatcaaatgtagatttggtcttttcatatagtcccatatttcttggaggctttgttgattccttttcattcttttttctctaatcctgtcttcatgctttatttcattaagttgatcttcaatctctgatatcctttcttccgcttgatcaattcagctattgatacttgtgtatgcttcacaaagttctcatgctgtgtttttcagctccatcaggtcatttatgttcttctctaaactggttattctagttagcaatttgtctaaccttttttcaaggttcttagcttccttgcattgggttagaacatgctcctttagctcagaggagtttgttattacccaccttctgaagcttacttctgtcaattcatcaaactcattctccatccagttttgttccctttctggcgaggagttgtgatcctttggagtagaagaggtattctggtttttggaattttcagcctttttgcactggtttctccccatcttcatggatttatctacctttggtctttgatgttggtggccttcggatggggtttctgtgtggacatccttttcaatgatgttgatgctcttcctctttgttagttttccttccaacagtcaggcccttctgctgcagatctgttggagtttgctggaggtccactccagaccatttgcctgggtatcaccagctgagtccgcagaacagcaaagattgctgcctgttccttcctctggaagcttcaccccaggggggcattcaccagatgccagccagagctctcctgtgtgaagtgtctgttggcccctcctggaaggtgtctccccctcaggaggcacaggggtcagggacccacttgagaaggcaatttgtcccttaccagagctcgaacactatgctcagagaactgctctcttcagagctggcaggcaggaacgtttaagtctgctgaagctgcacccacagccaccccttcccccaggtgctctgtcccaggagatgggggttttatctataagcccctgactggggctgctgcctttctttcagagatgccctgcccagagaggagggatctagagaggcagtctggctacagtggctttgctgagctgaggagggctccacccagttggaacttccccatggcttgctttacattgtgaggggaaaaccacctactcaagcctcagtaatggtgggcaccccttccccaaccaagctcaagcatcctgggtcgacttcagactgctatgctggcagtgagaatttcaagccagtggatcttagcttgctgggctccgtgggggtgggatccgctgagctagaccacttggctccctggcttcagcctcctttccaggggagtgaatggttctgtctcgctggtgttccaggtgccactggggtatgaaaaacaaacaaacaaaaaacctcctgcagctagctcagtgtctgccctaaaggctgctcagttttatgcttgaaacccagggccctggtagcgtagacacccaggggaatctccggatctgtgggttgtgaaggccatgggaaacgcatagtctctgggcgggagtgcagtgttcctcatggcacagtcccacatggcttcctttggcttggggagggagttccccgaccccttgcattttccaggtgaagtgatgccccaccctgtttcagcttgccctccatggactgcacccactttttaacctcctaaaacgttcctttcttctttgatctgctaacatcatccttatcaatggcccttcttggtttgttctcatagcttctacacatcaactataataacctatttttctgttccaactaagtacagccacacctcagagtttgagcatttgtaactgccttacctctatcaacttagtatctccttttccaatcttttcttccttgttcaactagctctgcaccctccttgtgctccttgagtatacattgttttttcatagtccagcagcctggacctcagtttcaggatttcagaaatatttttgcttatatcctggatgttctcacttattagtaactgctgatccagtccatggccctggccaaaaagactctgttttcctgatatgcagtcttgctagagaaagtcacaaaacagaaataattggcttcaccacagtcttatcatgtcagtggcagagactgacagttgcctacagagatatcttcccttccttagtaagagaaccctgacttttcactggttacattgaggaaataaaagactacattttccagcctcctttgtagatacacataactaacataacttctgcccaaatatatgaaagcaaaaattttgtataatacttccaggaaggctgcttaaagggacttaatacaactaaaatgagcaatttttgcctttctgcttttcctctttgtaaccaacacatatgtatctagagagccaccagccactttgaaccatgatgacagaagccatgaactaggatggtgaagaaaaaatagaatgagcctggtttctcttgacttggaactaccaaacagtcaatccctagtctgcctactacctctgggcttcctgtacataagagataaacagagtctctgccccaccaccacccctaggtattttcatctcactctagaatgacattatctccaacttgactgaaaacaatctgaaataatcttcagttttctactttatgcctttgtattcctttctatcaactatctcctcagattttccttacctctttttgttgcaacttctgccattaaatacatgagtttcttccctttttttttctaaaatatgttcttattatggttttcttcttctataatggcagaatatctccagtttttatatttttatttttactgttttttaattgatatataatagatgcagacattttcaaggtccatgtaataatttgatgtatttatataatcaaatcaggataattggggcatccatcatctcaaatatttatctgctctttatgctaggaacattcaaattgttctagctattttgaaatgtataatagtgttaacta

SEQ ID NO: 3150 - DNA, 5884 bp, Homo sapiens
attcagccggtgcgcgcggcggcgggaggcagtggctggggagtcccgtcgacgctctgttccgagagcgtgccccggaccgccagctcagaacaggggcagccgtgtagccgaacggaagctgggagcagccgggactggtggcccgcgcccgagctccgcaggcgggaagcaccctggatttaggaagtcccgggagcagcgcggcggcacctccctcacccaaggggccgcggcgacggtcacggggcgcggcgccaccgtgagcgacccaggccaggattctaaatagacggcccaggctcctcctccgcccgggccgcctcacctgcgggcattgccgcgccgcctccgccggtgtagacggcacctgcgccgccttgctcgcgggtctccgcccctcgcccaccctcactgcgccaggcccaggcagctcacctgtactggcgcgggctgcggaagcctgcgtgagccgaggcgttgaggcgcggcgcccacgccactgtcccgagaggacgcaggtggagcgggcgcggcttcgcggaacccggcgccggccgccgcagtggtcccagcctacaccgggttccggggacccggccgccagtgcccggggagtagccgccgccgtcggctgggcaccatgaacagcagcagcgccaacatcacctacgccagtcgcaagcggcggaagccggtgcagaaaacagtaaagccaatcccagctgaaggaatcaagtcaaatccttccaagcggcatagagaccgacttaatacagagttggaccgtttggctagcctgctgcctttcccacaagatgttattaataagttggacaaactttcagttcttaggctcagcgtcagttacctgagagccaagagcttctttgatgttgcattaaaatcctcccctactgaaagaaacggaggccaggataactgtagagcagcaaatttcagagaaggcctgaacttacaagaaggagaattcttattacaggctctgaatggctttgtattagttgtcactacagatgctttggtcttttatgcttcttctactatacaagattatctagggtttcagcagtctgatgtcatacatcagagtgtatatgaacttatccataccgaagaccgagctgaatttcagcgtcagctacactgggcattaaatccttctcagtgtacagagtctggacaaggaattgaagaagccactggtctcccccagacagtagtctgttataacccagaccagattcctccagaaaactctcctttaatggagaggtgcttcatatgtcgtctaaggtgtctgctggataattcatctggttttctggcaatgaatttccaagggaagttaaagtatcttcatggacagaaaaagaaagggaaagatggatcaatacttccacctcagttggctttgtttgcgatagctactccacttcagccaccatccatacttgaaatccggaccaaaaattttatctttagaaccaaacacaaactagacttcacacctattggttgtgatgccaaaggaagaattgttttaggatatactgaagcagagctgtgcacgagaggctcaggttatcagtttattcatgcagctgatatgctttattgtgccgagtcccatatccgaatgattaagactggagaaagtggcatgatagttttccggcttcttacaaaaaacaaccgatggacttgggtccagtctaatgcacgcctgctttataaaaatggaagaccagattatatcattgtaactcagagaccactaacagatgaggaaggaacagagcatttacgaaaacgaaatacgaagttgccttttatgtttaccactggagaagctgtgttgtatgaggcaaccaacccttttcctgccataatggatcccttaccactaaggactaaaaatggcactagtggaaaagactctgctaccacatccactctaagcaaggactctctcaatcctagttccctcctggctgccatgatgcaacaagatgagtctatttatctctatcctgcttcaagtacttcaagtactgcaccttttgaaaacaactttttcaacgaatctatgaatgaatgcagaaattggcaagataatactgcaccgatgggaaatgatactatcctgaaacatgagcaaattgaccagcctcaggatgtgaactcatttgctggaggtcacccagggctctttcaagatagtaaaaacagtgacttgtacagcataatgaaaaacctaggcattgattttgaagacatcagacacatgcagaatgaaaaatttttcagaaatgatttttctggtgaggttgacttcagagacattgacttaacggatgaaatcctgacgtatgtccaagattctttaagtaagtctcccttcataccttcagattatcaacagcaacagtccttggctctgaactcaagctgtatggtacaggaacacctacatctagaacagcaacagcaacatcaccaaaagcaagtagtagtggagccacagcaacagctgtgtcagaagatgaagcacatgcaagttaatggcatgtttgaaaattggaactctaaccaattcgtgcctttcaattgtccacagcaagacccacaacaatataatgtctttacagacttacatgggatcagtcaagagttcccctacaaatctgaaatggattctatgccttatacacagaactttatttcctgtaatcagcctgtattaccacaacattccaaatgtacagagctggactaccctatggggagttttgaaccatccccataccccactacttctagtttagaagattttgtcacttgtttacaacttcctgaaaaccaaaagcatggattaaatccacagtcagccataataactcctcagacatgttatgctggggccgtgtcgatgtatcagtgccagccagaacctcagcacacccacgtgggtcagatgcagtacaatccagtactgccaggccaacaggcatttttaaacaagtttcagaatggagttttaaatgaaacatatccagctgaattaaataacataaataacactcagactaccacacatcttcagccacttcatcatccgtcagaagccagaccttttcctgatttgacatccagtggattcctgtaattccaagcccaattttgaccctggtttttggattaaattagtttgtgaaggattatggaaaaataaaactgtcactgttggacgtcagcaagttcacatggaggcattgatgcatgctattcacaattattccaaaccaaattttaatttttgcttttagaaaagggagtttaaaaatggtatcaaaattacatatactacagtcaagatagaaagggtgctgccacggagtggtgaggtaccgtctacatttcacattattctgggcaccacaaaatatacaaaactttatcagggaaactaagattcttttaaattagaaaatattctctatttgaattatttctgtcacagtaaaaataaaatactttgagttttgagctactggattcttattagttccccaaatacaaagttagagaactaaactagtttttcctatcatgttaacctctgcttttatctcagatgttaaaataaatggtttggtgctttttataaaaagataatctcagtgctttcctccttcactgtttcatctaagtgcctcacatttttttctacctataacactctaggatgtatattttatataaagtattctttttcttttttaaattaatatctttctgcacacaaatattatttgtgtttcctaaatccaaccattttcattaattcaggcatattttaactccactgcttacctactttcttcaggtaaagggcaaataatgatcgaaaaaataattatttattacataatttagttgtttctagactataaatgttgctatgtgccttatgttgaaaaaatttaaaagtaaaatgtctttccaaattatttcttaattattataaaaatattaagacaatagcacttaaattcctcaacagtgttttcagaagaaataaatataccactctttacctttattgatatctccatgatgatagttgaatgttgcaatgtgaaaaatctgctgttaactgcaaccttgtttattaaattgcaagaagctttatttctagctttttaattaagcaaagcacccatttcaatgtgtataaattgtctttaaaaactgttttagacctataatccttgataatatattgtgttgactttataaatttcgcttcttagaacagtggaaactatgtgtttttctcatatttgaggagtgttaagattgcagatagcaaggtttggtgcaaagtattgtaatgagtgaattgaatggtgcattgtatagatataatgaacaaaattatttgtaagatatttgcagtttttcattttaaaaagtccataccttatatatgcacttaatttgttggggctttacatactttatcaatgtgtctttctaagaaatcaagtaatgaatccaactgcttaaagttggtattaataaaaagacaaccacatagttcgtttaccttcaaactttaggtttttttaatgatatactgatcttcattaccaataggcaaattaatcaccctaccaactttactgtcctaacatggtttaaaagaaaaaatgacaccatcttttattcttttttttttttttttttgagagagagtcttactctgccgcccaaactggagtgcagtggcacaatcttggctcactgcaacctctacctcctgggttcaagtgattctcttgcctcagcctcccgagttgctgggaaaattagctgggcatggtggcgtgagcctgtagtcctagctactcaggaggctgaggcaggagaatagcctgaacctgggaatcggaggttgcagagccaagatcgccccactgcactccagcctggcaatagaccgagactccgtctccaaaaaaaaaaaaaatacaatttttatttcttttactttttttagtaagttaatgtatataaaaatggcttcggacaaaatatctctgagttctgtgtattttcagtcaaaactttaaacctgtagaatcaatttaagtgttggaaaaaatttgtctgaaacatttcataatttgtttccagcatgaggtatctaaggatttagaccagaggtctagattaatactctatttttacatttaaaccttttattataagtcttacataaaccatttttgttactctcttccacatgttactggataaattgtttagtggaaaataggctttttaatcatgaatatgatgacaatcagttatacagttataaaattaaaagtttgaaaagcaatattgtatatttttatctatataaaataactaaaatgtatctaagaataataaaatcacgttaaaccaaatacacgtttgtctgtattgttaagtgccaaacaaaggatacttagtgcactgctacattgtgggatttatttctagatgatgtgcacatctaaggatatggatgtgtctaattttagtcttttcctgtaccaggtttttcttacaatacctgaagacttaccagtattctagtgtattatgaagctttcaacattactatgcacaaactagtgtttttcgatgttactaaattttaggtaaatgctttcatggcttttttcttcaaaatgttactgcttacatatatcatgcatagatttttgcttaaagtatgatttataatatcctcattatcaaagttgtatacaataatatataataaaataacaaatatgaataatat

SEQ ID NO: 3151 - protein, 838 aa, Homo sapiens
MNSSSANITYASRKRRKPVQKTVKPIPAEGIKSNPSKRHRDRLNTELDRLASLLPFPQDVINKLDKLSVLRLSVSYLRAKSFFDVKSSPTERNGGQDNCRAANFREQLQEGEFLLQALNGFVLVVTTDALVFYASSTIQDYLGFQQSDVIHQSVYELIHTEDRAEFQRQLHWALNPSQCTESGQGIEEATGLPQTVVCYNPDQIPPENSPLMERCFICRLRCLLDNSSGFLAMNFQGKLKYLHGQKKKGKDGSILPPQLALFAIATPLQPPSIIRTKNFIFRTKHKLDFTPIGCDAKGRIVLGYTEAELCTRGSGYQFIHAADMLYCAESHIRMIKTGESGMIVFRLLTKNNRWTWVQSNARLLYKNGRPDYIIVTQRPLTDEEGTEHLRKRNTKLPFMFTTGEAVLYEATNPFPAIMDPLPLRTKNGTSGKDSATTSTLSKDSLNPSSLLAAMMQQDESIYLYPASSTSSTAPFENNFFNESMNECRNWQDNTAPMGNDTILKHEQIDQPQDVNSFAGGHPGLFQDSKNSDKIMKNLGIDFEDIRHMQNEKFFRNDFSGEVDFRDIDLTDEILTYVQDSLSKSPFIPSDYQQQQSLALNSSCMVQEHLHLEQQQQHHQKQVVVEPQQQLCQKMKHMQVNGMFENWNSNQFVPFNCPQQDPQQYNVFTDLHGISQEFPYKSEMDSMPYTQNFISCNQPVLPQHSKCTELDYPMGSFEPSPYPTTSSLEDFVTCLQLPENQKHQPQSAIITPQTCYAGAVSMYQCQPEPQHTHVGQMQYNPVLPGQQAFLNKFQNGVLNETYPAELNNINNTQTTTHLQPLHHPSEARPFPDLTSSGFL

SEQ ID NO: 3152 - DNA, 96868 bp, Mus musculus
  misc_feature (1)...(96868): n = A, C, G, or T/U
tctctgctgaatcactttgtgggctacaaaaacatgagcttccccttcagtggcttggttccaagtttcctgtaagctcaatcaggattccccaggtggatcccacccacccccaaaacacaggcatactattctacttgcatttaccttttagatcactgatctcaaccagcagtggaaattctccactgtaggcatggtcctctgtactgtaggatgtttagccatgtccccagcctctacctgctagcctgaccacaccccttctcctctcccctccgatggctaaaagcacctctctagacatggccaaaatgttctctgaggacaaagaaccaccagaagtgacaaattttgaacttggagattcctttgtgtcacaaatatctcccacgtctcaagtgttgagatgcctttaagacaacatatccttccatagtggcaaagttttcagaatactcttgggtctgaaaggaggagagcaggagctacaggggtttgaacattgtaaggcagaaagaaagatgacacttccaaccctttgttacctagtccatctattaagcatgtggcccatgcttgggcagattatttgcagtgacttggcagtctaaggaggatttgggagatgggacatttttgaatgtttaagacaaagagtgcaaatgaaaagctctaggctgagtgatgatgggtccttttctatatgctgggctttgatttagttgagtccttaataccagacatagcactacttagtaattaaatatctgctaatgtgccaacagtttatgatggagaaggatactgagacgtctagaggtggagagagtgactgcccctgaggaaatgcctaaccaactgcactagaggcaaccagaccagagggacaaagaatgtgagctcagatttcctatggattttctgtaaaactttgagcatctataaatgaagataatgatggtgatttcttcaaggaactactctgaggattcaacaaggtcacatttgttaagtcttttctatgactgatgagcaaggaggaaggctgggttgacaatggagagtggcaggaggagggatctgaagagagctatggattcaactatattgaacaccagactgtttagcagggaaggtggaaaggaagggagaggggatataggtgggagaaatgcagggagaaggaggcaggagaggggaggggaaagaggaagaagaggggacggggagggaagagggagcaaatgctatctagaaacttctaaatggtctctgtgctagaaaagcaagacaagcagggaaaaatatgagactgaccaagcatctgcgggaacactgatggacctgttgccttggtgacatgactgactactcaattgtttgattttcttaggcttcctcagtgactttaaagccaaaagcagggaaagcaatggttgagttgaccttcattttgaggttattagaaaagctggattagaaggccaagaggcccaggacacaaaactaccctagggattaaactgaaaagaaatgaagccaaaaacccagggactaaactaagagactgggaggggcttgggaggagcttgggaactgcttggtctagggagagagggcaaggcaggatgtggtggacagagtgatcacaagggctctgaggtggagcctctgatgctaactctacatgggggagcagtggcgtgcaaatggaagcaaggccactcatcccatcccctgacctccacaccccaccatggtggagctccagccattctgtcccatcagcatgttttgttgccaaaggattcagcaatttgtaactacctgtagaaaatggcttcagcaagcatcattgtacgtggcaaggcaacatgattagtcaaaactggagggaagactgagggaagaaacacaaatctacagtacggaacatcaaccgacacgggattttaatcaaccgcccatatctatacctgaaagtctaaactttaagcaagttgattgatgtaaggcactttattcacgctgatcaaaattcctgttaaaggatgcgccttttcccaccaacctctggggtatacgccaaagaagcatctcaaaaaatgtttttccttccacattttcatcttgacattcctctctgctcaccatggtaccctcaacacacagacacaaatgcatggtgcatacatgttcttcctccctccatgtaagttatgagatccattcattcagtaaatatatgccaggcatgttctagagactagggccacagtggttagagataaactacttgctcatgaaaagcttagattccaagagacaaacacattcaccaataatttcaggggcaaaatgttataaaaaatatcatgagttccttatagtgatttttatacattggtattatgtgaaataatcacagactatatacatgtgcccattatcctttaggacgaggacaaaaattattatgcaatagggaccagtggcagaggagaagattcgccttctgtttctctagctcagaaaaccacaggaaaactagcatggagcatacctatggtcccagcactggggggtggaggtaggatgatcaggccacccccagctacacaagaagaccgatacgtcagaaaagacacagaaagaaaccacatggaatgtctggactagttatacacaaatcagaaacacattggtgctttttaaaagagtacgtctcacaaacgcatgcccacccctgtcttaccttcaaagacagctagttaaaactggcactgcccaggattttcctgtctctgcaacccatcaaaaggcagaaccttgatctgaggtttttgagtataatttcccaatccatgatttctaattcaagatctgagatacaaataccagagttcttccgctaagaactagtgtacaggcaatcacttctgagcaattcggtaggctatcctttaaaagggaacagtgtaagcattgctttgctctgtggaagacatactctggcatttcactccacacccaaactgagtaagagtgacaggactgatttttttccaacttacagatgaagaaagttaggggttcaattaagttctcccaaattatttctcttatccagcagggccttgttttatcatccggttgtttctagaggccacacccatggtctttagactttagtgaatttactccctccggtccaagatcgcacttgaacatacacaccaatctcttttaagccctgaaagccaagttcaatagcaggtttgttatgcttacaacctactcaaggtgaccaagttaagccaggaggagggcgggggtcattttgtgaagacctctcaaccaacagcacagttggtggtgttctctagaaaacctgaattcgccaagcaggaaacacaagttctgaaagatcgatgttctcttttcctactgtgctcgacccgcagttgcagggacaaagtgataagacgatacaaaacggtgaataaaacctcagccgcaaagatacccatctgatatcatgtgtctcatgactcctcctaggattcctcggacacttagaggaagccaggacatgcctgaaagcataaataaggctgaggagtccatgtccagcctcaggttccttccagctctctgctactgtaactccaggtggatgtgccacccatcagagtggggtgtgttttctttcagcttctcagagagccactgaggaatcaagagctgaaacacggctctaggtcttctaagatccacacgtagacaaaaaagtcaaccactggtgagttcacgctgtggggaatccatcccgaccgctgctctgttttctgttgtgagccctgtcctgtcctccccatctgatgtgcagtgggaagcctcactctgagacagcatctcatcttcacaaggaatccctcaagagcccctgagttagcagcaatgtccctttggccagccctgccactgccatgtgacctacaactcctagagctcagagccttcctccaaactgggtcacatctttgcaggaaaggaagactgggcagggccctcctggccttaatgtatggagccttccttctaactctgtagtatttgaacattctagttttccagggctgagactgtgaagtttgtggtaaaactgaccatccaaactgtgttctatatcctttaaatgctgcatagcactaaccacacacatcgtgtctctgatattctcttacatgctgcataaaaccatgcagactgtgtcctatatgctgtgcatgctgtattaaaccaaactttgatttttttttttgacaacgtcctgaccagcctcaacttgtgcaattttttttctttctctgactccctaatgccgggaggcaggtgacatcacagcttcctcgggccttgtgcgttttgatgtaaggaatacatgcagaaagaaacccaaaggaacaaaagattataaattagtttttaaaaatatttttaagattgaatttgtttagaattaaattgtaataaaaattaactacatgaacattttccaaatcacatctgttttagtaagtattctatacaagttctttccagaatttccagaattatatgtgaacagttcagatcagctccacatattgaagaacatctttggttttttcatctattatgcattctgagtcttggacacactgtctcctatattcttgtacatgctgtataaaaacagccatacagactgtgtctcctatattcttgtacatgctgtatgtataaaaccaaccatacagacggtgtcctatattttcatacatgctaaataaaactaaccatacagactgtgttctatattctcatacatgctgtataaaaaccaaactttgtccttcaataatcaaggtatcctacttttaaatactttctcaaatattaaagtaaattaaattattagagtaaagccaagcacagtgttgaatgcctgtaatcccactcttgagagactgaggcaggaagagacctcagttcaaacctactcagtttgcagaacaagaggaccctgcctcaaaacaaacttgaagagcaagtgggaatctaatgaaattctctttcagttttgtgctgctaaactcaatagaggtaaatcttttgaactagtttgctcaatagcattaatccttctaataagtcattgattggtgcatactactgaatgtattgtttactctgtgattatgtgacttgtgtgtgtgtgtgtgtgtgtgtgtgtgtgtgtgtgtgtgtgtgtgtaccggagcttgctggactcaagtgtgacaaaaagtatatcattatcatgaactcaaaggaagatcaaagctccaaatctaaacagtgtgtgggttttactgaacatagccaggtcacttttacaacagaaagtaaaaagggtcccaagtcacatgagttgggaccatctctatttaaatttctgagtaggtgttcctggtagaataattacatggatacctgaagtccattttcccaacctgatcactaaaacccctttgagagattttattttgcagaacacagtgataacctgctgagatcagtaagggatttacacattcaggcaggagagccggcacaaaagcaccccactatttaagtgtcttttatcaaacttcatcttttatcagctacacagacatttaaaccttacaacaattctgaaatgatttcatctagagtgtattttagtttgctataaaaatgaatctcaatacttaccaaaagaaaatgtgagcttaatttctaagacctccagccaatgtgataaatagtctttaattttgaaaatgtattctttaaaagccagtatgccaaattactgacttctctttcagaccagaacttatattttcagcattaaaatatgctatgaatccctccaaaaactggagtacacaagagatcagaagacaaagttggtcttcaatatacagaactgatcttaactgatcttacctatcattctgtttgctggaaaggatgtgtacaaaaaatgcttactatagcagatgtgatttggaaaatgcgcacagagttaatttttatcaatttaattctaaacaacaaattcaactctttaaaaaaaacatatttataatattttgttcttttggctttctatctgcatgtattccttacatcaaaatgcataagggccgaggcagctgtgatgacacgtgcctcccagcattcaggagaaaaagaattaccacaagctgaggccagtcaggaatacatagctagactttatccaggaagaaagaaagaaagaaagaaagaaagaaagaaagaaagaaagagagagagagagagagggagggnnnnnnnnnnnnnnnnnnnncaagcagagtttggtttaatacagcatgcacaggatataggatacagtctgcatggttttatgcagcatgtaagagaatatcagagtgtgtgtggttggttctatgcagcatttaaaggatatagaacacaatctggatggtcggttttaccacaaacttcacagtctcagccctggaaaactagaatgttcaaatactacagagttagaaggaaggctccatacattaaggccaggagggccctgcccagtcttcctttcctgcaaagatgtgacccagtttgaaggaaggctctgagctctaggagttgcaggtcacatggcagtggcagggctggccaaagggacactgctgctaactcaggggctcttgagggattccttgtgaagatgagatgctgtctcagagtgaggcttctcactgcacatcagatggggaggacaggacagggctcacaacagaaaacagagcagcggtcgggatggattcccacagcgtgaactcaccagtttctgacttttgtgtctacatgtggatcttaaaagacccagcgccgggtttcagctcttgattcctcaatggctctctgagaacactgagaaatcagagaaaggacaagaattaccacaagttgaagttaatcgggaatacatagcaacaccttgttatagacagacagacagacagacaaacagacagactaaattcgtattcctctcgactctcaggacggttgtacggttatcatgctttaaaagaaaggcatgcttctggatgctctcttactctgagtccctacctgaaaacattctaacctctgacccccaagtatttctccatttaatatggggatattacaaatgttccaaagccacgtttctataatccaggcagtacatagtcgttgctaatctctgggtgatcccaatatgctgacagatttgagaaggactggttcctaggcaaacttctgttcccacagtgtctgatgtttttcctggaggctccagcctgagcactgctgctccagagcatctctgtggcaccactgaggatgctgcagctctggaacagcacgcccatcctcccaatctgctgtaagattcaggggggtctttaacctttgaaccccggggctaaccctatgctccattgttgggagtacttaatacacccatggactagagccaaagaaaaacaacgcgaaaaatgatgatatgtaagtgcttctgaaaaagtaatcattgaagatgtgcacggatgcatcacttggtgaagtattccacttcagagaaacatctcatcggaccagcgaaaataaactagatcccatcgtcagaggataaaaccagaccacatacagacctgctgcattcttcattgtaaggagcacattaagagcccatcctgtgataagaaacacatcctttctcagtcccctttagttggctgcatgctgcttccaaggggcattttataaagtttataaaaccaacttagatagcttgaaatggtttacaaaaatatatcatgtaagagtgattattgtggtcttcacactgttaatatgaccattacaattcagaaaaaaaaaatttcacatagtaaattttaccacaatctagccctggacaataagtctgatctcacactttctttttttaaaaaaagctccataagatactttgctctttgggttacctaattgctttataatcacagttatgtttcacagtctaacaatatgctggggtttttttctctgctagattctcatatatgaaacctgaaaataagtcagatttaggaaacttttttccaaaatagtactatgtttcttgtttgtatgctggtttatctcattagacagcagttgattaccaattaatacccaatttgcactcatccggagtaaatataaaaagagagaaaaatatctttttttgtacgtgctcacacttgtggaagccagcaacaacttactattcacggtctccaaaatggaaaggcaattgaaaggtctgctggatagttgttttggagtcttttgtttgttttgttttgtttccaagacaaggtttctctgtgtagtcctggctgtcctggaactcactctgtagaccaggctggcctcaaactcagagatccacctgcccatctctgcctcctgtgggttgggattaaaggtctgcgccaccatggcccaccaggctggctggctagtttttatgtcaatttgacacaagctagattatttgggaagagggaacttcaactcttgagacctgcccccaaccacactggcctttggtgaattttctaattgatgattgatgtcaaagggcccagctcacatggaagggagaggggctacagtccctggcttggtggtcctacatacataaagaagcaagctgagcctggccggtaagaaacacttttccacggccatgccgggtttctgcattgagttcttgtcttgatttccctcagcgacgcagtgtgacttgagagctgtgtgcagaaataaacgctttggtttggtttggtgtttaatcacagcaatcagctatttcaaatacagcttctatggggtatcaagtgttcttcctcaggtgtctgcacctacatgaaaaagctagaatctcagattctcctcactggagcagcaccatccacaaaacacttagaagcttgtaactgtgggtggcagtgcccccaccacacacacacacttaagctgctagacacctaagcaggtccagataggtgcagcacaaacaagtggacttcgcttctttacccgactaccaaaaggagcaaagaaccctccattcctcttgggatctttggggttattgaaatcttctagggctgtcttttgcactgctcacagccaagccggcaaccttcaccaagggtacacatcattttgagggccacaggcagcggctgtttcaacctggggagacagactgagcgggggcggatgggcttaggcggcactcacagcccacatgcaggataaaaaccgtgaggtcgaagtgggcgcctgacgggagggggatagaggaatcacgaaatctcctcttctcgcaggggccgccccagttcagatttattaagccgcagctcacgtaaaacaaccacccccaggtaacccgtctaggcctgtgagggagaggctagggactagggtgtgcgggaggatggggggggggggggcatgagcggagaaggggaccttccgaaggaggggaggggnnnnnnnnnnnnnnnnnnnnnnnnnnnnnnnnnnnnnnnnnnnnnnnnnnnnnnnnnnnnnnnnnnnnnnnnnnnnnnnnnnnnnnnnnnnnnnnnnnnnnnnnnnnnnnnnnnnnnnnnnnnnnnnnnnnnnnnnnnnnnnnnnnnnnnnnnnnnnnnnnnnnnnnnnnnnnnnnnnnnnnnnnnnnnnnnnnnnnnnnnnnnnnnnnnnnnnnnnnnnnnnnnnnnnnnnnnnnnnnnnnnnnnnnnnnnnnnnnnnnnnnnnnnnnnnnnnnnnnnnnnnnnnnnnnnnnnnnnnnnnnnnnnnnngcgtgggcggggggcggggccagcttgccagcgttggtctggcggcagcaggagtgctgggagctgcgagtaggctcggcgccgctggagcagacgccggttgtgagtcggaagcctggcgctgtcgactttggaggtacgcgcgggagcgggcgccggcctgctggccccctttctgggacggcgcgccctggccgccgctgtgccccctgctggtctaaagtgcgattcccggctttgccgctctcggcgtctttcttctttctcacggggctctgggcgtcgggcaccgggcgggcaggtcgcctctccgcgagttggagctcgcccacgccggggcgggaggcccggggcccccgggcagcctcggccgcgagggaagcgcggagctagggggctgggctctgcgttcctgcgccccgatctccgagactctggctcgaggggtgcctgcctgtagcgccccgtccgtaactagctgggacgagccgtgagtcccgcgtacccgagcgatgtgcggtattgcctgttgtgcgcgcaggccggacagcccacttcgggaaggcaccccagcgcgtctgtccggtatccccgccagtgcctagtgtgggaaaccctgaagggggccttggggacacacgagtcccgggtgcggcctgcagaattttggtttctggaggaacttaacacgaccaggtaaaggagaccactagcctcccctccgggaaagcggggatgtggacagctcggggccacccaagtgaagtctacaggatttaaacaacacttggagttctagaatggcttagcctgatggtggagcgctttcttaaaggcaggaatggatggaaagctgtcaaagcaagcacatttaaagttgagataaaagctggaacaattttcagaccgtacagttgtgtggctagtgtcggaagaaattctggctcagtggcccccttacacctttgggggatttgtttatttatttatataagcggccagtctgttttgctagcattgcaccccgggagctgtgtagtgcccactgcgaggaaggaaaacttgtgcaaggattctcggcgcgtttgaacgtggaagggaaagcgtaccttgccagattttccacgcatgattcccccctttctttggaccgagtggtgtttgtttaccggtcttcgaagcatccacctacatttagtttttgcacgaaatacccactgttgccacagtgtgtagtttggggattagagaatgcttttggagaaaactgctagtggcttcattttccaagaatgtaagtcatttcctttctgtggtttcagggagttgatatttcacagcatcaaaaactctgtggggaaaattttccgtaatacatctgtcatttaaaaggcctgtgacttttgagttttcttaagaacagagcataaatttaggcccgactttgttgaaaggacaaaaagagtttttgtttgtttgttttctcttatcccgaatctagagcattgagagtgctgtagaaagttgtaacagccaagacctacaaatggcttgcaggatggagagtgggggaggggaagagagcagaatggagcaggaaaacagatgccttttgcttcggtcctttgtagtaaaacttctagcacctaatcattttccttgggtgtggttttgagaaattatagttttacgttaaaaatgagaatactccacaactggaggtggttgacatggaaatgtgagggttttaaggggagggtatgtttataaacatactcacttaatattttatagtaaaggagacctctggtagattattggatggcgagggtccccccggggatatcctatatcaagttatctgcaggatatcttctccagaaagcagactgactgtaataagaactaccccccctttccccgcccacctaccagctttgagtggcttacagaaatacctgcgatctgacacagtcacagctcttgcagggctcaaaacattttgagccaggcaaatcttctgactttcccatcgcttcctttttggggttagcaggggttaagacatcagtttcagatacacagtctgagggtgtagatttgagataccccgagctttacaggaaaatacccgaaagcaacacgggcaggctggaagccctccttttaaaacaaaatgctcccgtatgctatacaggttttttaaaaatctgccattcaactgggttggctgaattgggggctgttggagaccattccacatttaactatgcttataaagcttttggctttcagaacttatgacataatgggctgtgtagccttttgtggcagttgcttggaatgcaggtttcaaatagaattgttttggacagagtcctcagtttttaagagttctgtgtaaatgactcctgtctcacaactaagtttctgataaaagaattctttgtagttttcaacttgaatgttttacgttttgatttctagagccgtgttttctttctttttcttttttttaaataaaacctgcaaacaattattttattacatgaaagccagtaccaagaagagattaattcagtccagatgtagaaatgtatgtgaattgtaggtttgggtgatctcaacaagtttgccttttgttgatgaggctgtctggatcccagatggcatccacaaattatcccataggcctgtttctgaattgaagtctgaatttcatgggctttctccaaagtcgctttaatgttattttaaatcttctcaagagtagaaagctttctggacatacgcagagagggctattttcctgttattcctaattgagcctcatagtgacctagtgtagtacatggagtctgtttctggatgtaagagcaggaggtatataccctttagggtaactagccttaaagagggttggttttagttatttgagtctagcttttcttttcttctcttctcttttctttttttaacgggagttggggcaggggacaaacaaatttcaggtgtttacagccttcaatagaattcagctataagagtttgtggcttcaagttattttgttgtttgattaacctcaaccctctgccccctccttactctaaacaagcacagtttaaatgagaaaattgaatgattgttttccgagagtcagggttcctctctgcaacagccctgggcctggaactcactgtgtagaccatggtagccttgaactggaagagaactgcctgcctctgcttcctctgtgcttgggttaaagatgcccaccgccacaccgggccagactgatacatttttaaccaatccatcagtactccacacaagctctgatggacatttccaacctcctgtttttaggaagtcattgtatgattgtggggtttgttttgttctcgttgtttttgtcttttgattagtttgttttgttttgttttgtttttgttttttgagagagggtctcactatatagctctctggcttgtcctgtgtagaccaggctagcctcagactcacagagatccacctgcctctgcctcctagttctaggatactaggatgaaaggtgtgagccaccacctctggcttttgtttggctacataacaacacatttggtaactttgctatgttctggttatgtgtgaaacatgatttctgtgaaggtgttttatgaatagtgaaattttaattaaagcccatcttctctaaagctgagcaggaaaagtggtattgctggcttctctggccaaactctggataggggatagttgagagggcttttcagtttgcccgttgtcctggagaagggctttgctgatctatgtaagtaagaagaaacaaattaaaggaataatttaagaggaactaggtagcagaatattgagcactgggttacttgaaaaatttaaacttagaaggataaatagtgaaaaatcaatgctgaagtaggaagaactttttatctgaaaatagaaattaaaagaatatctttctagctgggcaaagggcaaattcgggaattgatgtgcctaggggtctgtatacagcctggaatgagctggcaattgattgttgtcctggaaaccttgcctcccttaatgttgattcaccagtttgctgttaagtggtgtgtatgggctgactgtcattactactcacccccacccggccacatctcctgttaaagaatggaaacttttgtgtgtaagtgctaatgattatacagacatttaattggtcagtagcattttagaaagctattaatacatacttgataaaaactgggaccaaagggtgcttcagtaatgctgacgagattaggtttggggtggaagtaggcactctgcacatctcattatgtttcatgatttagtagtgtaattacttctggtgcaagtttgtatatggccactctttgtatgcatcgagtggagccatcgtgcagtatatcaaattgatcaaagaaagattacagaacaccgaggagaaaaaaagaaaaagaaattgatctgacagccagctctgttgctccaggaagagaaaaatgtgttgaaacaaattcacagatgaaccagctagagtcctgagaaagagaaggcagtgcttacctggggcttccccgactttgtctctagctcagcatttcttacctttcttttccccagtctgcatgcccactgaggcagagttcaattagtaaggcagtagggattcaggcattagccaggtgactgtatttatcatgtacccacggggcaagattctgatcaaaagtgtcaatttagatggagagtatccttcgtgagttattcttagatgctttccagcaagcttgtgatttatagaaaatgatgtcttatattagcacaccgccgtggcctcatgggagagagaaagtcttccctaaagtaaagtaaactcaggagctggctctctggtcacattaatagaaatgtaattaatatcctccccacaggaaacagcatgtgctgcacagtttcaggggctggctggctttctttcacaccttttggtccttgctggtccttttggtccttatttctttgaatctgttgctcgcttactatatatgctcggagacatgcacaactcagaatcacctggcacaaagctgtctgggccaagaatgatcaccagtccaatttcttatctaataggttagttttaatctgttcttagatgtcatctaaatgcagttacatataggttgcttgggtttcttgtttccctttggagggttgcgtggtgtgtcttctttagcccaacagtgtcacgttatacatagaaatcggtgtaagcgttggcggttagtatgtctgtttccgaattctactgacagacacttggatagtgtggggatgatacgtagtgactaatcttctgatgactccaaagaaatttgagtacttcagaattgagagcataatcttaacattaaaagcaacagaaataacttaaaaataggatatggaaggatgagaggggcaggagcagcagccacactgcaggttcaacgtggagctcaaggtttatgagttacagttcgaatcgtgtcagccagaccgtggccacacttaagctaagcatcaaagatagggaaaggggccttaggtgacctatcagctaaccatcgggtttttagaggtggaatgactcagacctcgtctcaccctaaggaccatgtgagcttctccagacctggtgtagtccagccagcagctaaacagatgggctgctgcccagactagtgcaggttctgccctgctggggagaacacagggctggagccccgtccttctcattctcatctgccaggaggctcagtgcctagagggtgattgccctgttctgattcactccacactgctgtgtgtctgctcagatggtccgacctgtcagtcaaaatggatctgtagcaagatcaagtctcagttcctctctccccctccactgctgttctccacgctgagctgttgggatttctctctttccacttctccatccatctcatctttctcctgtctaggctggccagtgacatgttggattgtaaatgctgagtgcgtattttgaggactgtctttaaaatcatgtatttattttttattttattttatgtacattggtgatttgactgcatgtatgtttgtgtgaaggtgtccgatccccctgacacaagagttaaagacagttgtgagctaccacgtgggtgttaggagttgaaccccagtcctctggaattacatacagccagtgctcttaacctctgagccatctctgcagccctgtagaggaccttttaatttgctgctgtttcccctgtttatgcttttcccctctctgcagtttccctttctctgcatcttctcccccaacaaataaatgtcctcagaaccatccagtcttcaccaaaaccagtgttgaaattctgacgttgagtgctgcggccctcccgggaagcgcttaaccagaaccctagggctgtgatctcactgagagacccagtgatgaaaccaagagcttgggaactatgggtacacacacccacacacacacactcacacacacacacacacacacacactcacacacacacacacactcacacacacacactcacacacactcacacacacacacacacacacacacactcacacacacacacactcacacacacacacacacacacacacacactctctctctctctctctctctcatgtctccctgaagagtagaggacattttcatggttccaggcaaagtataacatttcagtttaggcccatgaaaaaggtggtagtagatgataaaatcacagaaagtttaaatgagagcacgtcatcctcggccctgttggaatgaggtactgctctcagcagcacaacgtaatcatgcatactcttgggaatgttcagatacactgaccagagatctgtagcctctgacggatgcccagtaaactcacaagaggaagtcatgatagcttgagcagtggataaaagaggcagggaagtaagatggtaagatggggggttttctttctttctttctttctttctttctttctttctttctttctttctttctttctttctttctttcaagacactgtacaaccctggctgtcctggaactctgtaccaggctggcctcaaactcagagatccccctttctctgcctcctgaatgttgggattataagggtgtggccacctctggctggctgattaggacttttttttttttaagttagcatgtatttgttttacacagtgataggtttcaaaagatatttccattccagtgtgtcacatgatttggcttatattcacccctccccctcatgcccttcctttacccagctattattgcttctctctttatgtcacagacacataagaatttcatatatgtatatgacatctagggaccatgtattagagaaaatgtggtatatgtctttctgactttgcttaatctcatttaatacagtaatgtccaaattcctttcattaacatgcaaatgacttactttatgattaaataacacatacacatggggggggttgtcagggaccaaattttcttcattcattcattcattcattcattcatttgctgataggaaggcaccaggcagactccacagcaggctgtcatcatgactgtgtgtctctagtatgctgacccagattccactgggtagcttcagagtcactccctggcatccatgctctgctgttctctattgggtaacaggagaaatcacctgtgctttgcatttccttctcttctgtaaaatgatgggtgatagaaagattacctgccccacagggttctcgtgatcggtagatgaaatggtacatgcgagacaaccagcctggctttgggcatacagtaagcggtcaagtggttttagctgttatcaagaggaaactacatatgggaagataaataggctttttagaggttgcctttgtttactgctagttcatcggattttcttctcaggaaaagcaggcaacaaaacctagtgatatctattaaaatattgggcagtttgtgctgcaggaggggcagctggcctttcccactgatcactaattgatggaaagaagttcccctacctccttctaatggtatttgcctttacagatatcaaacagtaaatccacatattaaaaataacctctttatggtcactcatattgggtaaagtactttcaaacttaagagtggcagaggaccctggtttctgctcatacaccctgtagaatttcccatgagcccctttaaagaaagctccattactgggatgaacagttgtttaatacatatacatgcatgcacacaccccagtttatatactgtgagtcaaacccttaatgactttctgttattgggcccaaagtttaagatttttaaagccattcattcagaggaaattaatagtccgaaagtttcagagggaatatttaagccaagaggaacttcacttaagcacattgggaagatacatttacatctaaacagcataattacaagcgcagctatgggccagcaggacccatgctgtatctttctcatctgctccttgggagtgaggggtgctacctcacatggcctgttcctgtctccgcactctgaaaacctcagacttggataaactgaacacttcagaagtgtacactaagcccaacagagagcaggctttatggagtgttcagaactgtgccagggagtggctgcagctcctgccagagttcacctgggtagtgagatacatgcacacggaaggggattagatgtttctggataagagatatatggagcctcagttatcagataacgagcagtgttgctccagtaatggggaggaagccagttggaactccatctcaggaacttcctggggatgtgggaaaagcttcaagtattacaaggaaactaagttaaaatggtggaacgcttaaattcagttgttcatctaacataaaacgcagccagcatatgccagtttgtgttgtaggccccagagatgtgtaagtgaacaaactagagaaagaaaaaaaaaagccctctcttcgtgtttgtcattaggaatgaatagtaagtagagtacattttatgtgcgagaagaaggtcatgagtatgaaacaaaaggaggtcaagggacaggagagatgatggtccagggagatggggacattcccgctgaggtacggacactgttgttggggttatgtctagtaatttcgtagtgagtcggtaatgctgggagttgaaagtgtgcttaaatgcacctgattgactgaacagcacagtgctggggagactgtgggaggggtcttgggatcatttgccctgttcagtcagtatcaggagacttgtcttaaatatcaccagccccggaaacaccaaaagccaaagtttggaacattttattgtatatcagtttttacattacagtaaacaacaacaacaaacccctcagattttctacagtgtaatttagcaagattggaaaggtgagttggtgagaaccatgcagaaggtctgaacaaggcattccagcagggggtggggaggacggatggagtaggctcaggtggacagagtctgagaatggtgagcaagaagaagagaagaggaagtcagaaagctcggtgactcatcaggtagggcttgcccaggccattagaaggactctggtttttacgctgagtgaagtaagggagctatgagtgttttgaacagagagggtacttatgacttgatacgagtgccagctagagggggacagaggatgcaggagttgtcagaggtagaaatagggtgccagtttgcagccgttgtcagtaatccccctggggagaaacaggcaagaaatctgtaagaaacaatagtggtctgaccatctaagccctgagatcaggcaatcaggctcacaccaaagccttttgcttcattgtgccagtgccccagatgggcaggattcccggaagctgttctgagttgtgtctgacttctgagtggagaagctgaagaaacggtcggctgtatgtgattctggagtccagagggagggtccagagagtttggcaattgctgacaggatgtagatccaataacttgtgtagacagagaaagacccacgaaccaagccttagggcagataagtatttatagttggtagagaagaaaagaaacagttcaagatagcattaagccaaagatcttacacacatatttccaagggagtgggtccttcattgagtgttgatgttgttactgactccattgaacacaccatgggcagaggaactgaattgtttttctgtttatggtgatgtgtaggatcaatgttaggatgctttatcaacagattggaatttagaacaagctaccagaaggatagctgggaatactcctgaagacagaacttggagctgagacagaaggaaggaccatccagagactgccccacctgggaatccatcccatatacaaaccaccaaacccagacactattgcatatgccagcaagattttgctgacaggaccctgatatagctgtctcttgtgaggctatgccagtgcctggcaaatacagaagtgggtgctcacagtcatctatttgatggaacacagggcccccaatggaggagctagagaaagtacccaaggagctgaaggggttcttcaacctataggtggaacaatatgaactaaccagtaccccctagagctgtgactctagctgtatatatagcagaggatggcctaataggccatcaatgagaggagaggcccttggtctttcaaagattatatgccccagtacaggggaatgccagggccaggaagcaggagtgggtgggttggggagcaggccagggggagggtataggggactttcgggatagcattagaaatgtaaatgaagaaaatatctaagaaagaaagagaggaagagagaaagagagaaagagtctccaagagagtgagtgagtggtgtcacacgttactctgaggtctgaggtcaagtggggtaagactggagagtcattctttggactcttgaagtcattctagcccaaggcagaagctgtggtagtagtaggggcatggacaaaaaccagttggagagggcctcgagaaaatgaaaactttacacaagataactattgtttgtaattctgtggcttacacaacatttaatattggttgtgtatatattttaatatgggggaggatttcagaaatcggattgttggaagactcgagggcttcagtgctcccctcttatggttagtgattgtctggtttgcagattgtaggtcgtctacttactgaaataggaaaaccattctaatgcagttttgaagtcgaaagttgaatgtctttgactaaagactatgctgaaagcactttatatcacactaatttatctgtccaacagtctgttcttgaattcaatatctgagtccttttatagaaaaagagctgtgtgttttcaggtggcattttctgagatggtggtaggtttggggtatccaggctgtgcatagaacccaccagcctggaagtcctcgttcacagagtgggttagaggtatgggttctcaagagccaagacaaatagtaaacttccctgtagtgtttattctatattttgttaatggttttcatgatgatccttatttttaagcatgtgattaagcaatttttataattctgtattttacatcataattggacaccaagaattttcccttcctggaattatctttgaattataatgctgattttatgtaatactgtcatcaaagtgaataaccacgtctctgatactaattaccttttctttctctaagcttattaaatactaatgcttgggctttgaatgtgcaaggattgtttttggagcattaaaagcttaagaatgattgggagagttaagacttggttacacgtatttgaatattgtttggtaataaaagattctttagaaagtcactaatcgtagagaaatgctggaaagggcaaagacttctcgttagcagtgggcgacggcacatggtttttttgagcagtggagcaccactgattatagcctatttctagtggactgtggcgtaggcatctaatgtcaacattctcttagcttctgctcggtcgacactttttttttattagcattttgcatgttttttcagctgaagcttacaagtcactctgcagttagtgaagtggttataattgacttgtaacagaggaacacacaaggccagtgtggaagaattccacagtgcagtattttccacggtgggtgccgaactttaagcagatttcgaaatcactgttaggttaggtctcttctgtcagggactgtaggatgctctccagatctcctggtgtgggcttttgcatgccaaaccaaagctgcatgcctgaggcccaccggcaagattggctgtaggcataatttagcttttaacacttttatttgccaacatctaaaatttgggaaatttggcatttaaaaaaaaattgtattttatgccttcccttgagaagtcagaaatcctggcagtggcctgttggcagagcataagagtttccttctctgtgtggcaagccccacggggcccagcagagagccagtgtccacaccagctggccttgagttgctgctttcctgctccatcctcgaggctgtgcgcctgctgggcgggtgctcttcggagccggtgtcacttcggagccgtcagaggtctacttaaatggtcttccccgtcatcctgtctgacacattaactccatgctgctctctcttctgggtctctctccagaatctgggctctgtgctgttgctcctcacagctgaaacccggcacctgccacttcgtccagtcatcttcctatgcatcaaccccactcacccccgcccctattcattttttgacagcaaagaccatatgatttactagcgccaacacattttattttaaatttactaggttagctgttttgattgagcttctggtatgtagtactctataattatgctgatggcatagaactagaaaacagcctactgtaaaatctccctcaaattgtactttctagatatgttattccccgtcctttgtcatagcctctgcataggctgctgggaatccattcactgacccttcagccaccttccatgttctactgtatcagtgtgtggtgtttccagataaatgagtcacactgcctaaaacctggggggtgggccgggccatcttagtgatgaacactgtcacaagtcctaaagttttcttcttctaaagttttcttcttctttttaatttatttatttttatttatatgagtacactgtatctgtcttcagacacacaccagaagaaggcatcggaccccattacagatggttgtgagccaccatgtggttgctgggaattgaactcaggaactctggaagagcagtcagtgcttttacccactgagccatctctccagcccaagtctaaagttttcatccatttgatgaataatgtgtacattatggtgcctactcctaaaaatcttacattctagcaagaaagataagattgattgattgattgattgattgattgattgattgattatttatttggttggttggttggcttttcaagacagagtttctctgtgtagccctggctatcctagaactctccctgtagaccaagctggtctcaaactcaaagatccacctgcctctgcctcccgaggttttttgttttggtttttggtttttgaagacaggggttctctgtgcagttctggccatcctagaactcactctgtgcgccaccactgcccggctcttttcttttcttttcttttcttttcttttcttttcttttcttttcttttcttttttttttttttaagacagggtctcactatgttttcctggctggcctagaattcactatgtgtgccaggttaaccttgaactcacaagtttcagcctgtacctactgatgaacacctttaatcccagcacctggaggcaggggcaggaggatctctgagttccaggccagcctggtctacatagcgagtctcaggacagctagagctacacagagaaaccctgtcatcttcaaaacaaaacagtaaaagaaaaaaaggatacagtgagatcttacagcagaccttaaaataatcagaatataaaaacatagactttgggagaaaattcatgaagatgtaattcctgtaactgtcaaaaccagggggtggggtttgaatgtttaaagaaggaaaaacaaatttccaaagagatttcttaggctgttgtcattgcagcagtgttaatactttatgactccagaatttgtttggtgattcaatctctttttgaagatcgaatgaaagacaaaaagaaaattaggctgtaaatgtaagacagctaatttgcaaagtaacttattttgatgaatctattatttcaaagacattcatagtaaggactgttctttctgagatgagagaaataaagataagtgagcgcccctcccccatgagacatgggtggcacctttatttagtgagtccaagctggtaactgaagagtgccagtgttttccccatctgatttctttaggaagtgatgagacccatggagaggaatgtttgtgtatattccttcaccacaaccggaaattgctctggttttcttccaatgaaaagagaattctctgcttaacgaaacctatgtgaatgcagtgttaatgttttcatagtaaattaaagtcagcttcagggggccagtttgacatattttaaggaattcaagttactcatagaaggtgattttttaaataacattttaaagcctactacttcatataaacctaagattttcaaatgtaacattaaaaatattttttcaaaaatcaaattaaggaacagttcacacacacacacacacacacacacacaaatgtctagtgcctaaaatttacagtaaattctaattgaatatgtttaaaatgaagcctttctaatcacaagagttcatttcagacatcagaaaaaggacatttagacgatttgtaactcactgaattatttgcttttacaggtgcctagagaaacattaaaagagaaatttccatgaagtcacagagtaaaacctggtccagaaaactaatggaagtgacccagatagagtagaaaattgcctttatcaatagcctgtgtgctcttaagtaggcctgcttcctgagaagtacggtgttaggagcttgggaatgagggtggtacagagagagatctaaattaatacgttttaatgcctgcttagatagggttttactgctatgaaaggataccatgaccaaagcaactcttacaaaggacaacatttagttggggctggcttacaggttcagagattcagtccattatcatcaaagcaggagtatggcagcgttcaggcaaccatgggactgaaggagctgatagttccaggcaactaagcaggcaactaggaagatcttaaagcccactctctcagtgacacacccagtccaacaaggccatacctcctaatagtgttactccctgagccaaaagtatacagaccatcacaatgtataaccaatttttttgttgttgaatagacatcgaaatagcattttaaattgcctaagagattggaaaggctgtgaacttttgtttgaggccttgggtgtgctgccttggagccagctagactgcgtttcggggcaccctagttgtggtgaaatggtgtggtggtgattcctgcatgtgttttctggtgctgcacagtgatactgttgggaggtctttgtggctttgcaggtcggcagcaagcaacttgacaacagatagatcctgtcctctccttcttgctccttccctgccacctggagcacagctgggtcttgactcatgtccagcagtgtcactgaaaatttattccttccgagcagtgtaaggtcattcaactagcatttgggtttacacctttagcaaatcaccatgtgacctactgacccataagtgacacaaacaactacagagagtgtgttctttcctaagtctgacatatgagtaaaatctgtggtcttgtaacagcaatatatattcagctcttaatattgacattggaaaaaaaagtagaaaaattgttccttaaatattcaaaagaccctaagtagaggctgagcatttatgactaccaatagaggcaaacaagagaaattatttgtgatttctcaaagtaagatcgggtatattggaatgtctgagattggggatgttgtgtgacaaaacttttcctggggagatgcaacacacatctcctcatctcagatacagaacccacgagagaccaaagtaccaacaccaccaaagctcaacttggtgaaccaatgaattttataggggttacttgcaggaatctgggtgaggggttacttgcaggagcagaaacgcctggaagacagctgcatcatcaaagcccaccccagcatgagtgagaactcacaaaagctgggaacctagaaattgacctggaagcaaagtacaactccttaggagcaagatacatatttatttaatgcttaaattccctaaataatctgagaactgagcctgaagacttctagttagacaaacaaaacagccgtaagacagacctttgaggggttaaatgactggacacctttatcttgtgcggtcattgtcaacagcagagctcagtactctctaacaactgtactgccctaccactactcactgtgtttgataaaataattgcagtatatgaaaaatgggcacaacacttttattcctacattttctctctctctctctctctctctctctacatacacacacacacacacacacacacacaacacacacatacacatacatatatattgaggtaggtactcactgcatagccttggctggcctgaaagcactactctacttagagctagcctctaacatgccacaatcctgcctcaaccttccaagtccttttggtaccttaaaaaagtcaattttagtttctaccagatacaagcaactttttttttttttttttttttttttagcgcgtgttgattttgcctgagagttttatttcagtctaactgaggcccaccttttcgcacagttttctgcttttcacaacggcttcaagttgacacagaattccaggtcattgacctttaaccacaaaaagcaaagccccgtgtaaaaagttacactgtggatcctttgtcggatgcagtggctaccttgttactttactgaactgactgaaaaaggaatctagaatgaaaagtgttttgaagtgattctacatttaaggattagacattaagttcagggacgtgatctactctacagcttcattaaaactgggctgcagaaggctctgaagccatgagataatttaagtactgttctgtggaagtatttctgccatataccttttatgggacactcgctcgcagatcgctttgagaattagatcgctttgagaatgagaacatcgatggctcctctcaacatttatttgtgtgccagagattttgctgaaattcagagatgagcctggcacaggtcatccagaaagcaaagggaagcaaacttacacagtggtagcagctctcctgggtttgtttgaaaagaaattacctgttacctattcagaagtcttgctcggtggtaacttttgagtctttgttttatgaagttgctggtgtcccgccttttggggtgctgagctgaagtggaacccagtgttggacaaaagactgaacatctccaaccttgtaatatttgctaactggaatgggggctagaagctcatggcttctgtaaacttaatactcttgcttattccatggctgaaaactgctggcttctttaactctttgtgcttaaataagcactggggaaacttaactgcaagaattctgaacagataaaagatcatctcgttgtcactgctctctgcttcaataagcactaaaaaacttgactcttaataaaataaataatcttacttaaataaacactgtagaattacgaaaaggatttattgctaatgctcctttctctggcaaatcagagtcagccagaagtctctcactggccgagcaagaaacttggagcttgctaactccttttgaaccagagagaagagaaaagaaaggaaaggaatgaagttactcacacagagaacatacacaaatgtgcacgcacacgcgcgcgcgcgcgcgcgcacacacacacacacacacacacacacacacacactggttaaagtggaaaatggcttcaccactttattgctttcagcctttttatagcttttaggcaaaaatctctgtgtaagaacacctcatagataaaatgttccataaaaggggagctacagaaaagtatcaataaccaagatcaaagcagtgtttcattctgtaagcttattataagttcaaagcaacagtttttacatggtcttattattttgcatgccttatagtacatacttgtggcttcatccttaaacctaaatgtttttccttaaacacaaatttatcccaagtcagttctctttttagtgtaattataaaagctcgttgtatttcttattatgcaacctttacttactattatgagtagtgggaacattctattagtgagtctaactttattacagctttctagcagaacagctaaaaccatctctcaaaactttcttcctaagatcatttgaatcaaatcaggaatttctataaactcattaattcatttaagcagtattaattcatgaaagttcatctttatgttgatctgcaggaagtctgctcaatagggtaggctaatgcccaggaatccttacactatgtaatagtgacagcaaaggcaagaagcaatcctgagatgaactcttggggccttgcctctcagagctcatccattacagaccatgcaaagatgatgggccaagacgggcaaagatggtctccaggaaggtccccttctagccttggcctttcttagatggcacttgacatgaagtggccttgacttcaccataactttctgcatttccttctaaggttgagtttcaagctcagggtttaagataaagccctggctttaccagttgaactgattttacactatatccattcatacatttcacatagaacaagaggtttgagttaataactgctgtttaacatataaacactagcagatgtaaattcatttttaaacattttaactttcctatgacaaattgcatgcatgaaaaataatgtttacaaaatttaagtggataattgagctttggcaaatgtagtcactcatgtaaccaacaaaacaactaaaatatagaatatctttgtcaggaccaaatgtttaccgtggccccattttaactaaccctcccccctcccccgcccaatccctttttcaccttgcttttatacatggtttcttctgtcatttagtatagtgtgtttgagggatatcaagctttgttagggatttcagtgaacatgttcgtgagtgattttttttttaagacagagttcttactgttttgaatatgttgcccacacagtagttccttttgccttcttgggggcattgagcttctcactgctgcctcatccattcccctgctgatgtaggatatttgcattgtttcattttggagccatgatgaagataccatgaacatccacattcttttcctgtcttagttgcatgttatacagatatgcaaccttaatagaaactgtctaattgttttgtgccatttcaggcctatcagcaatgaccaagagttcttgctccgaattctcactgagtcttggtattgttggtcttctgagttctatgtgtatgcagggtgactcaccatggcttttattcatcttcctagtgactgatgatgcagaccatcatctcaagcatgtgtctcagctgcagtaaccattcagatttattggcatagtttttttaagctgccggttttgtttagttacaggagctatctgtgttatattttttaggcttgttttgaagcagatgttcaattttttttccactttgaagatttctttatctttaaggtgactttcaaaggacaaagttctgtgaaggttttgttattcttttggttttattattcttgttttggggtgttctaagaatgtcacaaagatctaaatattttctataagttccaggaatttatctttttttaagtttagatctataactcatcaaaagttagcttctgtataaggacaatgataatttttccatgtactttcaatactgttgataaaaatgtattccccattaaattaattgagcacttttgccaaaagttagataactttatacaggttttagtcctgcactctttattctgttctgttgaatatttctgattttgtgcagttccattgacctatatacccatccttaggcccatattatacttttggctattgtatcttttataacaattctatgaatgagatagtaagacctactttgttttaaaaaaaaatttttttttgctaattttggattcatttgttaatttttgtaaagaaaaaacactgcaaagtttaaattttttatttttaaataatttgagaactacaataaattccaaaaagagtagttccattgtggaaccctttgatagcctctccactaggagaaaataaaaatctcatagctatatatgctttcaaaaccaggaacttgacattgacgtaagactgaatattcactgtgctttaggcttagagtaggtatatgttgtcctgggttttgggggtaagggtggattttgttttgattttttgagacagggtttttctgtatagccctgactatcctggaacttgctctgtagaccaggctaggctcaaactcagagatctgactgcctctgcctcccaagagctgggattaaaggtgtgcaccaccatgcccagcttcatctttgccctttatatcttgctggatttgacacaccaagttttgttaagggtttttgttaagtatgtccatgaaagatattggtcattttgtttgtttttcttataatgacaaggttttgggaaatgctggcctcataaaaataatcaggaaatgattctctttaatttcctgaaaattttgtatagaattggcttttttttttttttttttttcctttaaacattggtgattgttggagggacagcatctgatcttggcattttctttgtcaaattttcctagaaatttgttctgtgtgatagtggtgtattcagatagcctgtttctcaagtgagctctgggggtttgtcttttgagacatctgaacatttcagctatgttgttgaatctatcaacttcaattgtctgtgttaactgccccagttaccagattttgaattcagactctgttctagcatgtgagctattgtttggtcctctgaagatttgttttgaagcttgtaaggtattttaagagttgccttcagaccacagctatttcagatacttgctatggggagggccttcagagtaagccctctgtttccacacatgctagagggctgttctccctggctagtaggagagccatttccaggtgtcatgaatgcaggatttttggcctattgctctctgaagatcctggctctggctctgtgggagtcccctccccccccaactcctactcccgcacagccaccaatcagtacttagccagtgatttccagcatgtcccccaccccaaatctttggccctcactttgtgtctctatatccattgggtgttcttgtgctgccccaatccctgccttcctctgccgctccaactcagatctccaatctcatctgagtgagacagaaatcagcaagaaggagaaatttttacatacagtgaggtttgttttgttttgttttgttttttgtttttaatctttaaaactcctcagactagaagaattactcatgaaagtgtggagagctgagtattcggaggtgtttcatgcctcattttctcttgggctgattttgaggcatggttccagtaagtactcacctgctgatggaaatctgtttacaggtcacccagagtgtctcacacagacaccatggtaaggctggaatgaggggctgctgccaatggtttatcactaatgttgagaacctggagggcaggcatccttgttcctgtgcattggtggcttgggaaactgccactctctaccctcagagaaatcagtcccaaacccttaggtagattgcgttcaattggaggatggcttttgagagaatgacttgtcaggggattgtctgatatggaaacccaaatcgaaggtgaaatgacactaggtaacatttccaaaatgttctatgtgagaaagaattctcacccagctctccacagtagaaagctcatcgttacaggtgatgcgatttcttaactcattctccatccccaggtgctggcctttgaaattgggtcctagcatacaccctagcctctgagccatatctctagtctagacacccattcgttcatttattcattcacttgagacagagtttaccatgtagtcctggctggcctggaactcacagagatctgcctgcctctgcctcccaagtactgagactaaaggccatgggctaccactgcctggccttatttcctttttaatttatttttaaaaaattatttgtgctctgtgtgtgcgcacacagccatgattcttgtctagtggtcagagtgggagtggcttcaggactgggttctctccttccactctgggatgctaggattgaactcaggtttgtgcacgaagctcttttatccactgagccctcactgggtcgagtacttttcttatttttggttcttttgagacagggtctctctatgtaggtctggccattatagaactaaatatgtagattgggatggcttcaaactcacaaagatctgcctgcctttgattctccagtgctgggactaaaggtgtgtgccactgggctggcaagatgcacgcttttacttaaagcattcaaaaggctttgcttctgactcagatgaaatggttctgaggctacgagcaagagctaggcttgtcccagttaggattgatggagttgatagggtggtgctgcaccactggtgatgggcattggtcctgctgtgagtgacagctggccacagatgagccacctagccagttcacccaggctgaaagtccctggctcatcccaggaataagctgcctttccggtgtggtcacagccttatgaaaaaagtacagagctaaggtggggtagtttctggttttgtttgacttgggactttttaaaactgtaaccttcaaggttgaggcatatggctccatttttcatggaagattaaacatgttagtgtagggtgaggtgtgattctgatttccttcctccacaccctttaagaactagactgtaagtctctcacagcatcagcgggtgattaccgcaagaaggaatgtgctgtgtggagggagatgcacatcgcactaccaggactccagtgacaggtgggtcagagcgaggtaactggactaggctggtcctgactcactcttgcactcagtcagcctctcacataccacagggcacagaggcgcagcacacgcctccgtttccatccccgtagaagaataattacattgcccccgatttgcatcttatttcaaaaccctagtaataagagttagagaaataagacctgtgaatggggggagccatgcagaatgctaccccacaggtaaatgccgttccgttcaaaaataacattccagctggcggacctgtctgattttggtagttaccttccagaagctgaaggaactaaatactggctactaggtaagagacagcgtcaaggtgaagtttccctggggaacaatataagggccgtagcctggctttcccccatcttccaacagccacttaacagcgacgacacaacccaccttgatctccacagagcagaccagctcatgagtttgatgacacttttgggactcttcaccaaggcggggccggagcagatgtttttaatgtgtctgatagagactccctgtgtgaaagtagctatggtgaacattttgtgaagctgtaaaaaataggtcaggcacagagcacatacttttatcattttccttaagtacttttaaagccataaattacagctccatctgtatatgacggtctccaactcatgtattcaaagcaaaatccccaagggggtgtaaaacaagacttcatagcagtgtaaagctttgttggaccgttttcctttgatgcctgtagactgtgcttttgatcttttactgaaaagggtgtctgtccccagattacatatgcacaggtcatgtgtatatgtatgcatgtacgaagccataccttgtggaactaccacatgtctgggtgtgtctgtgtaacagtgtaatctcagcctcatagttaatatatatagggataaaagttgaatttctggcgtgtcaaagtctttctctagcttcgtaagttttcccatataattctatggctgtcagattttttttaaaagacattttattagcacttgagtatgtttgacgtagtcaaatgcttccaaatgtttaactttctattaaatttataactattatactttccagagagatttaaattatctcatattcattgctgttttaaagcagggaaggaaaatcctataaggaaaagcccagcccacattggcagggtcatttgcttaaatgacagttttttttgcctgtcaagttcccaagtaccacagaggtgaagatttctctggttgtactttgttacagtgtttctgtttaatgtactttgaaactcgagacaggaacacacatgttatcactaaatgtctcctaagctctcactaacactgagcgccctggaggttgtttttcagtctcaaagctgtgatagcaattatgtggtaggtggaatcttttataataatgtagaatgtgataaactgcacacagttctcagtgggtcccattgtgcagtgtggcaggcttgtatatcgttttaaaactcagccaccagtgtgtggtgatttttgctgtccatactcactgatgtcaccttctaaattggaagttcacacatagaaaagagcttaaaatgtcttatgtaatttttaatgcagttttgagattaatcattcctttgtcttcctaaacgagtcattctttatttttgactgtttttgaacttgttagtcatagagattgtgtcatatcttcctgttaatttgatttttgcaccatttttgagatttatatttattcatctttagctatagttcacgtcttttccctgtgagcggtttgaacactgaatgctttactcttggcaggggatgtctctgtttccaacttgtatgtgtattcctatgaggaactatttaatgatatggaaaaagtggtcttccaaaaacagatagcaacttctcaaatgtttcattccatctttcttgaagtcattgtaactgtgttctctttgaacaaaagtatttcaggaaaaacatcaaaaagttagttttaaatatgtgtgtgtgtgtgtgtgtgtgtgtgtgtgtgtgtattaatgagaatttcacaacaaagttatcatttacaaaaccataattcctgtgtcagatggaattgagtgcaagtcccgtgaatgaaggaatcaaagatttcattgtagaaattagaagcagatgcttttcgggccagtgttttccctgagaacagcactttttgttggctgtgtcaggctggaagttcatcttggctgaaaggaatttttgtgcctcagtgctaagcctgctatgacttttgaatgcagaacgctgaggaaataaaagtttctgtggtttaaaatccgtgaatttccagcattgcttctgccctctctgctgactgcctacccagccacactatcctggcttccctgtggtactagaggaagttggttctaccccaggatgtagaaacggacttgttgctgctttgatggggcattgtgacccatgacctttgacccttagctgaggatccttgtgtgctaccgcattctagttaatgaagcccctctgagagacaccaccagccttcagatgtcaaggtgtcaggaagaaatcaggtcctagatgacattgtgtgctcctccatcaaatccacttaagtcattagctttatacattctccttaaattacttaatgagtcaggctgtgtaaatagtcgagatttgtccttaccctgtgccttacagtaccctacaacacatgttctgtacagaaagggagtaggacacacccagagtcatacagctagtaaatgactggtgagtccatcagtgaacagagtcagaaccaagcagttggctctagtgtccaagtttccatttccctggggtggttttttggcacttgcaatttggggaatcaaaccaatgccttttttgtatgtgtatttgtggagtggggggttgttttttttgtttgtttggtttgagttttgttgttgttgttgttattgggggagggtttggttttggttttggttttttttttgggggggggggttgttttttgtttttgtttttttttccgagacagggtttctttgtgtagccctggcttgtcttagaactcactctgtagaccaggctagcctcaaactcagaaatccacctgcctctgcctcctaagtgctgggattaaaggcatgtgccaccactccctggcttaatatgtgtatattttaataaaaattgctgtaacagaaatatggagactttttaaatactctttgttgagagtattggggatgtgttttgaggaaaagacaagatgtaatcattgtgtctatactcttgtagatattaaaaaagctgtggtcagtactgaatatccatagaggaaaaaggatttatttatttatttgtttgcttgcttgcttgattattcgttagtgtttgagacagggtcccactctgtagccaggctgccctataattcactgtgtagttcaggcaggggctgaaacactcaaccactcaacaaccttcctgcctcagctgactgaatgttaggattacagttatgagccaaaggctgtttaaggaacataatatcacttaatcactaaggaatttctttgctttcttttttttttttttttttttttttttttggctagcaagtctaaaataaattcagcaagtctcacaggggttcccagtgagtcttcagcaggtctcagcaaggttcccagtgtagcaggggagctgttccaagcattagcaagctaataaaaacctgtcccagccaaaggacgagctccccgctgaccaggagcagaggcagcagctgctgacagccagggaccaggagacaggcttcctagacctgcacctgcactgtctagggagcaggaaggatggggtttgttttcttgaagaagttggcagatgggacaggatgcgagggaggatgttctgggcagaggaaacagcttggtaaaagcaaaagaaaggcagtgaaatgagtcgcagtgacccagaacatgagtgacggaggaccacagtgcctaggctgtcgtgtgttccagagaatcactacaggtgcaaacacatgcattattcatggccagaggtacaggttggtaacagagtagcaggaagtcctgctagtctgagaatgtggaaatcctggtgagaaaagcagtcgtcatggagcgggttatccaaagggtggagtacaggaagagggatgttatttttcccttctaagataatttttaaatgtttatagagcactcagatcttttaagcattgaagatcactctgttatttaccccatctccccaaccccagtctttctgatttgaaagattagctatcaaaacaaatcaggttgtctgttttcattttatcactatgctgtcttagtcagggtttctattcctgcacaaacatcatgaccaagaagcaagttgggaaggaaagggtttattcagcttacatttccacattgctgttcatcactgaaggaagtcaggactggaactcaagcagggcaggaagcaggagctgatgcagaggccatggagggatgttctttactggcttgcttctcctggcttgctcagcctgctctcttatagaacccaggactaccagcccagagatggtcccaccaaggggcctttcccccttgatcactaattgagaaaatgcctgaagttcctttctttgtgataactccagctgtgtcaagttgacacaaaactagccagtacactatgccatgtgaacctgtgttcctcaactaagaattcaaatgtaggagtgctatttaactgagtgacttaacttcattttctctgcggtatgagtggggcaaatatgacatttgtgtcagggttttaggaagaatgacggatggccctgaccccttttatgggccctaagaacaaagcctttctaggcactgagcaatagaatggtgcttgtccctgcagtctagaaaacaggcatccaagtctgctttgacggaatagggcaagaaaagtcactgtggcttcctcgagtacctccgctgccttgccctccgcttaaccttctcgctcaagcaagtagagtgcaatgttacaggaaataatgatggagaggcagaggttgggatcaggagttggaatagcaacagtagagcttgaaaaaaaccgtcaggatagctgaagcaggtgattgtctgagtggccgtcctcctgacaagtgtgccggcccatttgatagcagcacttagcatttagctagggtataatagtattaactctctgttgtttctactgcgttgtctttgacccctctcagaggagtcctcatgatctctggtggccagaatctagcagcggtctgagggataacaagcacacacacaggctggtcgtctcctcatatgacatcataagctggaatgctgtggcaccagaagctttataggcacctgtcaccaggacactccagaagttttccatgtcggaggctcacattaggaacttttgctgttatatctaggcaggtgttccaaaactggcaaacctctagaacctgaaacattctggtctcgtcccaaaaatttcaaacataggctattcaactaggaagatttcaccaagcatcagggtgctcaggagcaaaccggttacttatttattggtttggatccctgcattgctcctgtagttgtactgcaaaggtgcatagtggccatggctggtgtggtgtttgtcattggaaggacgtgtggcaaatggctcttcctgacggcatctctgatgcactatggtttacaagcaccttgccacatatacacatccgtttcttagatgcatgctatttcactggatgtgtttgttcccaggtgtaatatgctcccgtgcgattattgctccagaagtgcggttgttaaatccaaagatgtgactatctttatgactgtttctgtagataatgcagtatacgttatagtgattggccatgccagccatgatgtaggagattgtgtcagctgttttatcacaatgtgacatacttgtttggttcttcacacgctctgttcaagtcaagaagcaatacctcatttaaccttgagaccagagcagtctactgtacagttcttttccattcctaactttgaggtgtagcaaatctcactggttaaatataattgtgaaatgaccgcagagggaagtgtggagaggaaagagaggttagctcccacgaagagaagaaatttcttttagctctcaagatagtcattagcaaaataagttatagatccacatatgagtcatgtgcccactttctttatattatgtaaagccagttatattacttggcataaatagtatacagtgtgtttactaagcatttcacttaggtgagcaacctgtttaataatctttgcaataatctcatgtcaaaggtgagagaagcagtgaagagatttgccccgtggttaaagtgtcccaggcaggcaggcaggcaggcaggcagacagacagacacacacacagagtctggcagactctgttcttgagcaagcaattgctctgtgaccatcaccttccttcctccgagacttaacctttctgcagctaactgccattctagagacagaaagggtatttcccgcacactaacataaccacctgtgaggttgctttaacgattactttaacggcttagcttgccccttaccagccatacgaaataggctctaattttttgtttctttgtttgttttaccaaaaatgtgtttatattgctaatagttaagttgccaaaccagggggcaactattttttgggttatcctgtttgcagagactctcccacccccacccccacccccagctactgtaattctttacaaatggacaatacatgcagcagcatggctctgcaggaaggcatactgggacagggttcttcacccacacagtaatactcaagacgggatggccctttgctgcggaaagcactcttgtgagttagttgcccgatatgcttgtttcccttaaatgagtttattgggtatggagctcttagaaagtagtattgtctgcaaagtgcggatacctgacataaccctaaccccctcccttctaggtctcctctgctcacagtgaatgttcatcacacagctcattcctcattgtctctttcaagtggagagaagttttaaaatacagcattgttctttaagtaaaatatgaatgttgctacacagcaagaggtagtcgtgagttttggtgagtacatggattggtcaaccagttaacttattggatgcactgagttagagaggatacactcagtagttgcaagtgccagtgaaggagaccagaagggatagctgggcttcttatgggaattcctggggggttctgggacagatatctataacagttcaaatgatatgataccttgttcttccttagtttcccttcagtgacggacggcatccttcccaggaatagtccttatcacacaggaatgccagcaggctcataggaagcaacccaaagaagaagatagctacttccagcctagcatttatataacaaaggtcttggaggagccccattttgcctagggggtgtatgttcacctgattcatagatgaagcattgtggttggagaatggggtgccctccttggacagactgggccacaccccaccctaccctatctctgagcatccttcggtcaccagcacacatttggactcacctgctctttctaaacagaatttcaaaggggtagtgacctaatgcactgtcactgcgccgtgtacaaccagcagtacacgtcccccttcccaggataagcctgcagtaacatagcccaggtgctgcatctggctgtgaaatcgagagctgagatgacttattgcatggctcggttgtggctgtcctccctacctggaaattcatagctgctagcacacaacctttcttaccttaaacaacaacaacaacaaaaaaacgtgataccgaatgctttatattcattttgccatttcatttatccagcattttaggaggccactgttacagattttacaaaatgaacacgtggtcacccagctggtatatcaggatctagggttaactgatactctttcctgtgcgtgctgtaaacccctgagaaccagctctgggggtgggctgcatcctaaccctttccccagcgctccatttctctactacagcaaggttggaagtgcagaaaaagagcaaacaggaaatggatgttcttcccagaccacttggctgcaggggcttagtggccacctggcacttccttcttaggtgcaattgtcactacaaaaactagccatagggctggagagatggctcagtagttaagagcacttactgcttttttagaagacccaggttctggtcacagcacctacatgacagcttataaccctcttgagttataatcccacgggacccagttaccttctctggactctgtgcacagggcacgtatgtggtgcgcatacatactcctaggcaagcactcagacacattaaaaactggccatgaacagacacaatcccagttcatgattcctctaactaaatgataaaattaaattttactattctcaaatatctcatggaagcaagtgacccttttttaaatcctttattagctaaaatatccaggaggatcacagaccaaacatcatgtttccaggtcattgttcatattttcaggtcttgagtagagagagctcttggaccatgtgcctggccggtaacaggagcacatgtgccgtctaagcagcctgatagtgcacagcctcggtcttgtttcaagaaagcagaattccaaagctatcccaggactgcaggctatgtccatctacaaagttagttagaaaaacttgaagttagaaaaacttgctcggaatagatttttttcccccctttgaaattaaattgcttgtttttaatttaaaaaaaaatgcatgtttggacctgtgttcaatgccagatgatgtaaaactctctgcagctccaggtccaggggatccaactccctcttctgcccttagtaggcactgcattcatgtgtgcttacacacgctctctcacacacacttcattaaaaacaaatctcacgtgtatttaataaaagtgacaatggataattttgcctcagagtaaattttggcagtgcccattagcattgtgggttgtcacaactggtaaaaaagaaggggttctggcacttagtgggcagaagcaagaagcagctaacatacgtgcgattcaggatgacccccacgcaaagactgtctggctcccgtgacagcaatgctgaattagtttattttctcattgttgtgacaaagtgcccaataggagaaccttggaggagggaagatttattctgcttcccaggccattctgcagggataacattggtggcaaggctctatggtaacaggagcttatggtggtgcagcagggaaagccgaaacaaccaggggtaggtgcagcctccacagggctttcttttctcaggtacttatctctttgaactatgccttacatctcaaaagttccataacgtcccccaaacagtgcaaccaggagccccaagtgcacctggaagaccctttgcacattcaagggccaaggctaagaaatggggtcttcactgttcagggatgtgtgttgtaagcaaacaggcagcagttaatgagtgttattccacacgtctggtcttggccatacctagtggccccgctctaagatctgagtagagcagacagacaagcaaaggcagaattggaagtggctgagctaagtggtcatatagaggtgatattctgatacaagaaccaaggtgtctgcttaagttggttgtcagtgatgcaagctcctagcctggcttgctcacacagcacacctaagttctggagagaaagacccctggtttcttcctggggaacatgacaaaggagtcaccgttttcttcccttgagtgcttagcagcaatgctcagcatggagcaggtgtgtagcaaatgttacgccatcgtcggcaccgttacttcatccgtgctgagcagcgatcgatcgagccttcacatttaccattgtctgcctggagatcttctgagacagatgggtagatgggagggtggaagacatgacaccctgctctttcctcaggtgtttgctcacatgtcagcccatcagcaagaggccccatcacctgatacaatagcatgtctgcactacatggccatagcgtcagcaccgtcattctggcctaccatatgtactcactgcctgcttgtcacacagtaggtgtttcaagcacatattttgtattaataaaataagtgagcaaaactgtggaacttgttctatgaaagacatggggtagcattttaggacagtatactagagccttcctaatgctgcgaccctttaatatagctcctcgtgttgtagtgacgcccaaccatagaattattttcatcgctacttcataactctaattttgctactgttgtgaattataatgtaaatatctaatatttgacccctgtgaaagggtcattgaccccccccaaagggatcttgacccacagattagagccactgctctagagtgatttttttttaatcacatagtctagcttacagtaaaggctatatttctgcactttaaaattgttattcagctgcatcatccctcgagttgacatgtcagctatgtatgtgcttttgggaatcggagacagtagtcacactcctttggcagtgaccctgactggagacgccttagcttctgtattctctttttcagcgagtagtgagcacagagtctgagtgctgtgtgtgtgccctaagctttgtaaatggccagcagttaagttagaaggtcgggttctcacagtccactttccaaaatagtctccttcgcttttgttagataatagagtggccatgttggctgctgatggattctttgttaatcatgtctgccgttcatgatctcagcgaggataggaccatcaccctacgcgttagggaggtagcaccagaaagagaaccctgttttgcctctatcctttctgaaaatgtattatgtgggtataaattcaagactgaagattctatgtatatttttttgcaagtcttttgggggaagagttgtgggtctgatcactgccagcacaatcttttgtcactaccaggtttgttcatgaattatgggacacaagggcattgctctggggtaggaatgtgtcttcctgggactgagttggggctcagcgtaaaacatagaaccagtagccagtggccctctacccaatttttgcaatccaaattggtataaattctgtctagatactgttttccaggacagtgtagtttaagactaaactttatccttgtgtgaattagagataggttacggttccatttgtgtttgcctttttagtggaacctttgaaccagctttaatgctgtcttggcacagtgaaggcttgggggttgagtttgccacccgcaaagtgttaagtgcagctgtggaccaatggtactacttctgacctgggctccagtaaatctactgcagtagtttttgtcctgattttgtactgtgtctgaaccataaaataaaagttgtacccaggggtctggagagatggcacagcggttaagagtactgacttgctctttcttccaaaggtcctgaattcaattttcagcaaccccatagtggttcacaactacctgtaataggatccagtgccctcttctggtgtgtctgaagacagctacagtgtactcatataaataaataaataaataaataaataaataaataaataaataaatgatttttaaaggttgtacccaaatgaaacttttcctgtattttaatgaagccctggaaatatcctaaacctcagaagatttttgcccccaagtttaacttttaaattccaaaaagtaggtcagtagaaatgtcttgctttaattggctcaattaaaaatggaaaagcatagtactatctcaatatgaaatgcagatttaagtaggaattataatgggactaatatcacttaagggtatgatttaaaataagctatattcaatcataggtaataatttatgtagtaaagacaggcctaaatgttggaatattccaattttccaaagggaaagcttttgccatgaaatttagtagcatgataaagattcagtccagaacgcctttcccaagagataggcctaggaatagtgtttacccggaccttaatagcaggctctggggagaaacgtgttctgtgctcagtgagtgtgtgaaatgttgtcagacttaagcagtttgccttcacaacttctcagagcttttaatactttctgaatatttgtttgtttgtttgtttgttttcaagacagggtttctttgtgtatccctggctgtcctggaactcgatctgtagacaaggccagcctcagtctcagagatggtcctaattttgcttcctccatgctgggattaaagatgtgcatcatgaccacccctccttactttctgagttttaaaacaggttataagtatggcgaggactctcagtctccaaatttaacccattttagggattgtattagattcaggtttttgagacagggtctccctctgttaccctggctggactggccccaacttgcagcccttgtcgtccttctgaggactaggattggaagtgtgcatcaccacatctgtcttgtgtttggttccctgaggtagggtcttgctgtatctagaactgaattggaacgtacagaagcccagggtggccttgaacttgaagttttcctgcttcagtataccagcatggacctggcttgctttagggatgcattacctttggaaatgctgagaatattttcagcagtagcaatgaggggtggttctctggtgttggtcagctcttaggctgttctcccaacatttgccctgagagtgtagtggaatcccgcactgtgttggtcccttacccatttgacgtggaggtctccacatgtgcctgtagttgtcatgagtagacgtgtctctgtggcttggcctctgcatttatctctaagcccatgtgtgattcacacatagccaacatcatccttccagcagtgcttagacactgttgactgagaagagctcactttctggattaatggctacatttgaagagcagttcctggaactcagggactgagcatccactctaaggaagatgacagccctagcctccagaggtgtgctagaaaccaagttggggagcaatcacccttcccctttgaggaagacataacgtccaagcgatggatggtccccttcctaagaaggaactaccacatacaagattactgcctaatttcagttttgagtaattctcttgacgattgtattttattcatgttttaaaaaaatcactaggtcctatttactcctggtaccatccatgaatagatcctctctggctgaaaacaaatgaactttaaggagctgataggtcaggcttgtgccttggagatcagtttcatatttctggacttactttcccgaatcctgcaaatatggctgcagaggaataatgtaaatagcactgacttgagagacagctagtcttaacacactgcagttgaagaatgccctgctagcaacacatgaagcactccacaagagaaggaaaaactcaccaaggcttttaaattattctacagggtctcaccaatgcccggagacagaaaacagaaatgaaggacagaatactgaagaccagagataaaagtttctttacttgcaagcaaagttctatacttcaaacctttaaaaaagcaaaagcaaaaacaaacaaaaaaacttaatgttactaaactgacgaaactggagaggtttctaaagcccatagctcttttccatatcgatatggtttgagaatacagtcttagtattgctatgtgttatttgattggtgaactaatgaattaaattttaatcagccagctagagaaccaggagaatgcaggacataaaaactaaggaggacttaatagccatggggaatgtcgtggagagatcagtgacatgagtgactgctgcagctcccgtggcgggtccagcagccagggcttcctttgcagagccaaccgtcaggcatgactgagacaggagcgaaagactcattcggattctgtagtcctggaagagaggctttgttgatgctgtttttatagttcactccagaaccccgtcacctccctggtgaactggaactcctcagtcaggatccattgccttgaccttatggtacttggtccatctgtgaatgtccgggctctcactgtgtctgttcactcttgtctaagagcgaagcgtgaagacagttaatagacaggatgtgtgtgcaccgagtatggccgtctcagcttgaaatgctctttcctgtttccctgtgcctgcgtgaatagttgtgtgccactggcctctctccccttaccagactctttcccctttattcacaggtctcccagtggactttctacagctatgaaacctacactgtggggcaccacgatgcttccgttggccgtatgatgaggaggagaagttggctttggagtgctgggagcctgagaagttgctgagcacccagcgcccccagcccgcccactggcccgcccataacacaatgaacaaactgaccttccataacaacaaagccatgcaggaccgtcgcagagtgtgtattttcctccccaatgacaagtccgtgagcatcatcataaatgtgagtagctccagctagggatatttcagtgtactcttccctgtaagaccacacccacgttaggtgaggtggttcagggttagatcattgctgccacaagctgtagacagcactatgacttcaacagcagcatgcttggggtcaaattaggactttgagtactacactaagacaaagccaaaaagtctgtttttaaacttcattgaaatgttttcagttgaattagttaactgggcttctctgctcccttatctttctgtgtgctcagctgtggtacatttggaattgtttggagtatcttccacatttccagtcgggtctagggaatgcttctcattcacggtgctcagccacggtgccccctcagatcccaccaccaaactcagtttctttgagtttgcttcactctgtttctgtattgagaagaattcattttattgtttctactgagcggaagcctctgtcttgtcttgccaaaaagcaatgtgacacgacgggaactggagactagagatggaggaaggagaggatctgaaaatggcagtaaattttatttcagcattggtttttgtctctcaaattgcttggcttcctgaataaaatttctattttgtgtctgtctgtgttttaaatgctcagagttgtcaaccgcgcacatgaagtggtagcagttgctaagtttctctttttcatcttgactgtagtttatcagtagtcagagtctaagccctgtccgggctgagcagatgctggagatgagctaagatgtcctctgcctcttacatcagaatcagatactggttaaccagtcttgagaactgagatagtcttatttttcccctttttacttttagcagttaagttatactttacgcattgcaaagcatcaacatccttcagtgtacagtctagtgtatctctgttagtttatgctcctatgtagctggtgcccagtttcagatttcctgtctcctcagaaagaccctttgggactcttcctcgacagcaattgtcctcagtgataacaactgttttgatgggaaggcggtcccactcagttacgactctcctgccaccagaatgatgtagttcttaccataaagccctttttcactcagcctctgaccatggaattgccacagcagcagtcatttgtcttccttataagataatatcccagcagtatggccgagtcccattttgttacacacttactgctgttgatggatattgtgccatttgaaattccatattaataaaactgctatgacccctcctggggtgtagtcctacagacacagacacacttaggtcactgtgattttatcagactggatatgtaactcatagaccatcccagggagtacagttgctggaaactgccagcaggctcatgataatccgttttgtgcctatcaactttggggtttctttgttgttgttgttttgttttgagataaggctttactatgtaggccaggctggcctggaaattgctgtatagaccaggctagcctcaaactcatcagcatctgacatctgcctgcctcccaagtgctgggactgaaggtgtgaactgccatgcccagacctgtcactgatggaactaaggaaagcttgcctcaagttagttttctacttgtgtgctgatatagttttaatatgttctgcataatgaaatagttatgcagaacataaatgacttgtaaataactcgattagaagtttaggttgcagcaaggttctgctgtaaccataggcgtctggtttgttccttgtttgactcaggtcacctcgatgctgcccatctcaattctgggagcatcgaacctgccttgtggatggattttactgccttcagggcagagtttctaataataagctaggatcctgattagggaacttgaaattggttttgggtatatggggtgatagactattatctttgccggacttgatttttaaaatgtaatgaaaattggaaacatttcagtgtgggcaccaggaacataaattaaaatgaaagtaaaattcaactatttatgactctgttgtgtgaatacacacacacacatacacacatacatatatgcactcatatatgtgtttatatatgtataaatatatgtaatatatattgtgtcctttacatttttaagcacatgcaatctaggacatactgcataagcattgaggacacttccacctttgtctgttacccagtgaggtatagtgaggtgtgtaagggtgtctatgagtgtgcagcatggtgtagtgaggtgtgtaagggtgcatgagtgtgcagcatgcacaaatgtgcaggatgggaggagtcctaacacatctctctacatgaggagaactaagaggtggctacagtttccaaaggaattcattggctctggagtctctgcctagggaaatagctttggagagcagactaacagaccccaggtgggctcatggcatgttttatgggtcatacctagcgtttttaaaacgttcttcctactgtcaaccttcttttttttaacccaatttcactctggtaaaattcagcagacgctgccttaaagtggtactgtggattttcccacacgcacgcatgctgctgtgtagatgggtggctttaaaacttgaccgtgtactagaagtattggggagaggctgtttgggcttcacccatggagagactgatgtaggtctagggcaggagacaggaatcttcatttagcaaaattcctcagtagggactggagactcaataaaatcctaaggcagtcagaaagggtgaggtgcgggccactagagagagagagagagagagagagagagagagagagagagagagccaagcgctgcttcttacagtaccttggaacctatgtccgtcactgagactgttgatactggggacctggactgagccatctgctccgtggcttcctttacagctttgggcatgctgcttaggtctgtcgttcattatttcggtctggtttccttatatgtgaagtgggactattctatgcctcatgtggactatatcaaggatttaaagagactccgtgtgtaaagaactttgtatcgtgtctgtccgtggagttactcagtaagtcagtcttgatggagcatcgcctcacatgtcccatccctgtgctctttgtcatttcgttagggtactttgtcgctggcatgcaggcccagacttcctactccagggaacatagatcctccgccatgtcgaggctcctctcctgcaagccttgggacctctggaaggatgaggttaaacagcaaggagacttgtccactgctagaaaaaacaattttaatctttccagggctccctttccccacagcagagagtggtgattttgctatttgcagtgttgggcattagaaaataattgtaacaaaactgtttatcagtggcctcccaacccctcccccagcagtcaggatgcacccacatacactttttaaaataaagttttcccctggcaggtatagttgacttcgtattggctttctgcatctggagtaagtataatgttttagtcattttgaatctccatgaattatactaataggagctattttaaattaatcttaatcatcaaacaaatacaaaaaaaaatggacacttaaaaaagaaaatcctggtaaatgtaagagacagagagtttttagagtggcagaaatcacagagccaagagcttgcacctccagtccctgcagttaggcgaacaattctttcttaccagagactatttcaaacatccttgcctggtaacaaacaattggcacagcgaggatcaagccccattccaattcagagttccacacagagggtatttttagataaagcctacactgttgagaatgtagtgctttctaaagtcccattgcccctgaagatgaaagggattaaaaattttcacaagcagccatgtggccttaaagatttctagtctgcaaatacccaacgctggctcctgttttcacagcaggtaacactctcaagccacatccttatttaattatagttttgaaacaagagcactatacttacttgatgatcgttaaagagctctagcagaaggttctagatacttgattcaaagtagcagaacagtaataactagatgggaggcctggaagaaaggcacagccttgtggagtcaagagtcaccacatattttactttataaaccttcagtttgtaatttggagtttagcagcttgttacatttcatctgactgctccaattccaactcagacttaaacgcagccaagctaagggttaaaagggccccaagaacagtgcgacattttaagtctcaagttgatggggctgagttcagcataagagctgtctgtaaatgtggtcctttctcctctccactgtcagtctgttgtttaaagttgtttgtaacagtatagttacgaggtggaatactagcccagtgtttacagtgaacgttggaaataaagaggacttcactaggacacaaagtaaataccccagctgctggatcaagctagccccaaggggccaggggtaatggtttcccaggcagccagggggtcttcccaggggtgaggtgagcttgcgtcaatacattgttattaaattgctggatgacagggctggagagatggctcagaagcggaaagcactggttactcttccagaggacccacaggaactcagtcagttccagggaagaaaatgctctcctctggcttctgagagtactgcatgcttgaggtacacagacatattaggcaaaacaccacccagggacataaaaaaaggtttgaaaacatttgctggatggcgtgagtatatgctagagtgtccgtagtggtaactgggagatgaggctagtggagcacggtgacggtcctcgggagctccctgggaacgggaccccgctcaccctcaggaaccaccatggtgcctgcctcatgaaggtcctggagagacgatcctgcctcaaatggcccatctttgtcactgtgacaggatctagaaccactcaggcaaaccactcagcatgtctgtgaggggttctctggattaggttaattgacacgtgccctccccacccccaccttcctacagcaatggcccacaagccaggtgttacgtcagagcagcgagaagtaacaatagcctccatgtcctcctccaaggcagcttccttcgtggctgctgcctgaagaatgagcacgtgctctggccctcagtgacttctgctctttcctctgggattttgcctgttttcattttcttagttttagttctgtatgaaaatatgataggatcactaactcaaagttaagtaatttaggtaagtaagtaaatcatagtcactaaaattataaattataaaattatacttcagttatcattgaaaaacaaaagaacatgacggctgataatgcctatgagaggaagtggacatgtaacatgtacagacaaaatcacaaacatgtgttgcccgtgtgttaacatgtatgtaactgtacatataacctttgagtgtctgcctttgtcactcctcacatgacttggagcagttttattttctacttctataaaatacagaaattgagctggatgcattcttgggtgattcagtttcagtgaggcagatgcgggaggctcacttaactcccacctgataattcattcacagttgagaaagcatcagaactatatctggggcctggagatttgcctcagggtaaaagtgcttgcggagttcaagcccccagaacctagttaaaagcttggcacagcaacataggcatgttacagtgtttagaatcagaggaccaacagcaaagagattctcaaacaagattgacctttgactgcccccccccacacacacaccatttacacacatgtaaaaatacatgcatttatataaacatacatatatacaaaacaaaaatatgtaatgtcctctcaattcagaatagctcatctccagaatctcatattagtagatattatattaatgtcagtatgattgaattatactgagattcagaaagggaaaagtgagttaaacagtaactggaattgattgaaataaataaaatctgggcagtctgtcactgggcagtagatgagtatttggcttataccttcaagaagaaaactttgctttaaaatagatgccctaagcagacactgctcatgggaagatacgcagggggctgatgggtctctaaagagtacttggctcagtaagtgtcaagaaagtgtcaattaaaactgcagccaggtactgccttacagaggtttaaatggctgccaccaaacagaaaagttgacaagagttgccgaggacatggggggaggggcacctgtcatctgctggtcaggacgtaaagcagtgtggccttctgttaaatagcatggtgcttcctcaaagtactaaatacagatggactgtgatctcacaggtcctctcctgggtatccagaggaaatgacatctgtatgcttagagtttctcaaaacctcctttatttagggttcttaaacgcttcaacctaccgtccagaggtagcagggagaaaaagttcgtaggaaagcagtgttatggaccttttagaagtagttcctttgggagattccactcttccttgtcaggataccccagtccacttcaatagtaaaccccaaacaggaatcagtagcagcagcagaaacagcaaggctccacctcgtcagcacaggtcagcacgagtcagcagaagcagccagaagcagctggactaccacaagaagttcttgggtgcttttctccctctgaggtgaagaccagtgaagtgtggcatgatgtagcaatgcagaagcatccttgctgtttgtggggttccttttatattctttctaaacatcgggcaccttctcaagtgtctgttttcatctcaaaacatcaacgccctctcacaagacagcttccagaaacacatcacttgacacaactgaactgagttgtttttttaaaaaaaaaaaaaaaaaaaaaaggccacttcaggcatcactgtggtggatgtacacctgcattcacattgcctgcagcctcgtgcgtagcagttggtggcgcccactggcgactgaagagacagtgtggtacgtccacacatggtggagtaattaggccacgtcaggagggagacttgtcatttgctacactatgggtaaatctgcaaagcattatactaaatgtcgtaagttaggcacagactgcatgggctcctttgtgcagtcataaaagggtaccttacctcataggagcagagtgcacggtagttaccagggcctgaagtgggcagggcagggagatgctggccaaagggtctgatgtttcagctaagaggatgaataagatcaaaaagactctgcagaatggaaaccataactaataatgtgccggatacctagacattgctgcctgagggtagatcttaagtgttcttaccacataccaaaatgatgtgaggcgttgcattggttaagccattctgcaggcagcagttctcagcctaggggtcatgacccctaggagtggtaaaccaccctttcacagggggttgcctaagaccatcagaaaacagatatttgcattatgattcttaaaagtggtaaaattgggctggagagatggctcagtggttaagagcaccgactgctcttccgaaggccctgagttcaaatcccagcaaccacatggtggctcacaaccatctgtaatgagacatctatggtgtacttacatataataaatatataaatctaaaaaaaagtggtaaaattgcaattatgaagtagcaacaaaaataactatatgaaggcagttcaccacaatatgacgacctgtgttaaaggatcacagcatttgagaacaccgctgtagggtatacttataccaaaacattgaatactgtataaaaatgtatccattcatgtaagaaaaaatggtaaaagacagaacatactgccaagtaaatacctttaatggagcaagctcttctaaaggccctgtttttcatgcatgatctgagaccctgacccacgtgtcatgagatttatgagtcttgtgtaagattgcattggtacccggttatcatgctgtacaactgatagtcattgagacacagccccaggttgcagagatttccaaaaaccaggggtgattttactgatgtcagggtgtcctgtgaaggtgtagatttacaaagtttaaaaagtgcctgattgtgtcagtgtggctgaatttaagtagctcaagtgtctttctttttctctccctcccacaggttaaaattctgtgtcaccagttgctggtccaggtgtgtgacctgctcaggttaaaggacagtcacctctttggtctcagtgttatacaaagtaagtttcagtccactctctggtatctttagccaactgtctccaaggacatgacattttaaagtctaaagccatcgtgctacgtgagctgtcaaaatacccatccactgatccccgttccaagtgtagtatttattttccaatgtcagctgatgtacttcttatgtgatttgggatttttattattgttgttacgttttagacttagtaatgtcgttccttttgtttcattttgttttaatgagccaggcttggtttttattgttgctgctgttttcgtgaccacggagaccagccctatcttggaggaaaggagatggtttttgtcatttgtcattaccatctacaacgctacaaatgataatggcttgtgacattaccaaaattttgaacatagtaaaactgcctttcttctgttcagattctcttgcaattaaaagtatgacagtgatggattaattgaattttttttttctgtttttcgtcacgtccttttcttttttctagtcaggcggtgtgactgtaaaatgcagtcattttcttccaccattatattaggaatttgcagggaaggatttcataggcactccctgtctcatgtcccttacttagcaccagacccttgggacttacagccatttgttaaaagctctcttatgtcaaagtatatctagaaatttctccgctttactttttaaatctcagaatattttaacatgtctgctcatctttttcaaggagatttacttgtgtttaattatactctctacatttatgtgtatagtcgttttctcggattgttttaaatctaaaggttgtgatagtttgagaatctggtcggtgctgtgaatgtttatatctgccaagttagaaaatatattgtcaacagaaaaagcgggctccctttcttccaaaatgggaactgtgttcggttgcctttcttggaacatggaatgaggaatgcagacagccctgcatgtcagccatttgccctctgcttcactcctgtagtagtcagtgcagtgaaaacaggaaggctaaccaccatctttgggtctagaagcgggaagctgctgcccagattccagacgactcttgctgtgccctcaaaggcgttcttccttctgcacctgcagccagactgttgatctctgtggttcaacaagccggtccaagaaaaccagttcatagcttcctccagattccaaacaagagcttttaagttgctctttaaaggagagtttgcagtgtggtgaaagagcagtggaacggcagtcaggtgacctggttcagattctggttctactgctggctagcagtcgtgtctgaaggggttcagacatgccaccagacttccctcactgtcaagacaatgtaatgtgacagacagaagctgctgttgtgccagctttgcaggatggacgtgcatttcagaatttgcatcacaggtttttcgttcttagtgtggatttggattcccaggcaggtgaggaggaagtatagagggttctagaacaccatgcacatgcaggtatagcgtccccactgtcatccccaacctgacactctatcgcccagagtccatccttcccacgtggcttccctcctggtgtttgtatcccacgactttagacagatgtactgcatgtatccaccatcggggtgtggaggatggctgtactgccttgaagccactcacaccattttaaattggtgactgaaattgtcactgtctgttcaatagttggaaagaatgtactttgaacattggcatttttaagattcagtcaatctaacactctttaaaaatccatctaaatagcaagaatcacaatgccattctttcagttttgtattgaaataatttcaaagttccaagaagacaatgagagtctccttaggtattaacaccaacatttcttcctccatctgtgatctaccttcctgtttcccatctctccacacgtgagaccagcagcatcttctacgtaaccacgtggcaacattacaatcaggaagtccatgccccagtgctaagtagtctttagttttctccaggggtcctaggactgtccatcatagtcacagatggtctggtttcaagtctttattcttcagccacccctcagcctcccttgtggccttggctttttttttttcctcccccttttctttttttaagagaacagtcaggttactttgtggaatgtcctttaatttgggtttggtttatgtttccttatggttaattcaggttatgcgtgatttgggtggggatatcagataaatgataaagtgccattctcactgtacagtatcatggggcacactaattatttatgtccttatggtgatgttagttttggcaaaagttcctccacacactttctgtgatatccgtgagctcgagttaacacttctgatgacaatccagttccatgagattcagtccgcctcttctttccattgcttatggcttctttcttcaacagtgagaaacctggcttatttgctcgcacatttaggagtatattatatataaaggatattacagaggtacagagtagtctagggcaaagtttgggaaggggaacgcagctcttctgctcagtttgtgtctaccagtctatatgtgtccagctacccagagttctcaagctagatagctctggtcacactgtcaagtgacagacacataaaggtaatttaaggtgtgcactgtgctcacagactccccgagactctggcagcacacgagggctgcacaggtcgcagctagacaagggtctcaggctgagagggggaaggagtgcccattcctaacccagacgctatctctaattaacaaccacttacaggaaagcttagtttttttctagtggcgtctcactgggtatacacaccacacttaagggaaggccccatgcccagcgggagatgaccaacacaatactcaatggtatttttgtagacattttgtcttgtattgctttgtttgggtattttttatcttaactgttcttttgtttgtatattattgtttctgattttgcatttgtgtgggtgttatttgtgtgggtgtgtgtatgtttctcgtgctttttctttgttttgttttttaaattctgatttttattattagcatttttttttctaaagaactagaggaagcatggaattgggtgggaatggaagggagagaggatatagaaggaatggggaggggaaaccacgatcagaatatagtctatgaagaatttattttcaataaaaataaaatgtaaatatgcatgtgctgctctgagcagtctcccttctggtcatcattgtgctgcttccaacaggagctcaaaccacacactagtcagagtcatgttcagtcagaaagatgaaaggctaggaggcagcttctactgacctgggtgttgggttaagtggaagatgttaagaggcctgaacagcccacttacagacagagtagcttccgttttcaatgacatcttccagtcaaccccagcgttcatcagggttttactgtgcagtcagctcacatcttcctggaatgagaatggtgcacgtcccttcattgggaaggtcgttatggagcatccagaagaggatgcctttagtgatggagaaaaaattagctggagtgagtgagtgtgtgtgagtgtgtgtgtgtgtgtgtgtgtgtgtgtgtgtgtgtgcgcgtgcacgtgcgcgcgcatgtgtgtgtgtgagggtgtgcgtgtgtgcatgcgcatgtattaattaaagccttgtacaaaatcggaatgccaaggacttctcctgtggaatagatctttgcaaaaaattctctcaaagaaaagttaaagaaaaaaaatgtgtttggcccggcttgtttccttatgttccgctcacattatgtaagttccaggagacagattttctgttccctttaaaaacatgtcaccactccagccccacttgagggattgtttggagtcaaatattgtttttccgcaagacttttctcttgtgtggatagatcctgaaggcagaccgagggccggtttgtccttctggcaagctcgtgccctggtgtggggaacacagaatggatgttttaaaagccaactcctcagaaagcaggtgttggcccatgcttggacatgtgctaccatcaatgccccagtgttcagagcgaccgagcacagtactgctgtgtcagcatttttcacctatgagaagattcttctccccactaaaccgaagtgtttctctaagctgtgtgtccacaggaatggacgctcagtggtctgtaaagatcctggaagctaagcacatgtggtcattagaaaccacatgtcttctaagcttttcatcctctagaatctcgagtgctgtgttgcagaagcaaaagaccccgtcagctcagtaatgtccagcttgtgcccttgtgtccttttgtgtccttatgcaacattctcagatcaggaggctggtttctggaattgtagctttgggtagttttttttttctttgaaacaaatcttttttctttagcatctctctctctttttttaatgtgcagataatgaacatgtatatatggaattgtcacaaaagctttataagtattgtccaaaagaatggaaaaaggaggccagcaaggtacggcaatacgaagtcacttgggtgagattacatttatacgcaaaattctttttattctgtaaaaatgtttattttagctgtcacgttagaataaaaaaaatcataggcaataatttacccagtagaaactgaaaaggggaaatgaattataagcactgaaatgccttgtggatcagatgtgagtacctgacagcataaaccgataggttacaatgttttcataatcatggggtagtgctttacagtgaaaagcaggagagaggatctgattttctcctgtgacagtgttgtcaaaacttgtaggaggctttagtaatttttaaatttgctttttttatggttcttgcatccaagcttttgttgtttcactgtacagcatggtatctttatgtagttaatatcagtcaggttgggggaaggggaaatcacaggctggtccccgtagtttctgccatcacctagtgagtcaggaatgaagttacatccaatcccagatcctcccatagcagtgcaggggatcctccatagcagtgcaagggatcctcccatagcagtgcaggggatcctccatagcagtgcaggggatcctccatagcagtgcaggggatcctccatagcagtgcaggggatcctccatagcagtgcaggggatcctccatatcagtgcaggggatcctcccatagcagtgcaggggatcctccatagcagtgcaggggatcctcccatagcagtgcaggggatcctccatagcagtgcaggggatcctccatagcagtgcaggggatcctccatagcagtgcaggagatcctccatagcagtgcaggggatcctcccatagcagtgcaggggatcctccatagcagtgcaggggatcctccatagcagtgcaggggatcctccatagcagtgcaggggatcctcccatagcagtgcaggggatcctccatagcagtgcaggggatcctcccatagcagtgcaggggatcctccatagcagtgcaggggtcttgggctaagctggaaggggacttcaaagccaactgcagagcaaagcccccaacatttaagtaaacaagctgtgtgctagaatgtgctgtgtggaatgctgagggaacaagacagcatttgtaatagggagcaaatggtcactgcagggaacagagctgggccaggagccggctctcagctagaaatttccatgacatttatttttatcttcccttatgttgccattggcagcatggcaagcaggcgagtgagaatccggagagggagggtgccctgctttacgttgtaacttcttggtcggatgtggacctggtgcccgtgtgggacaactttccgctgctacaagccccatgttaggaacagatgagcctgtttgtgtttggaaatgtgccttgcaagtgacggtagcgtggttgtgtttgatgcctgtcttggagataacaaaacacagctcactgcatgtgtctctgtctcagggcatcgaccagtttgggccccccatgatcatccacttccgggtgcagtactacgtggagaatgggaagctgatcaggtatgagaacaggccacgggccggagcctcggtgccctctgcagcgcttctttcggcagacaccaagcacatcctggtgccagcgctgcctgccttccgcctgttagcacataaacgctgcagcagcagcagcagcagcagcacttggggctttgcttgtttcttcacattcttgtattcttggtgcccaccacaccagaggcacattggtttcttcctgagtgtggcaggctgagggagaaaacgttaatgccaccagctcacatttgcacactcagcccaaaggagctgtcagtgttttggaacaagatttattaaatatgcttatattctttcccaagagggacagggccacaaactctcaaactccttggttttccattagcctggtttccccttcacttgaggtcttgctcgtactcttaatcactagtttaaaaattaagagtaagcacacatctttaatcccagcacttggaaggcagaggcaggcagatctctgcggccagcctggtctacagaatgagtcccaggacagccagggatacatagagaaaccccttcttgaaaaacaacaagaaactaagtgtgagcctggagaagggggagcttcctatgaaatcaagggtgcaagctgaggggcggagaacagactctatcttcttggaaacggatgcatgatccgtgtcagggtgtaaactagacttagctggttgtgaacctctttctttggtgtgggattcagtgctagagattacacttcagcgaacagaaactacaggaaacatgagcttgttttccttttccttttaaactttgagagaccttcatatgaaagaagaaatacgcggggctaatgttccatgaaaagctagcatttgctattttctgtcgtcagcaggtgcaaagtaagagtaaggagtattagtacatagagcatatttctaaggcctagaaaggtcattagtcagccttcgcctgcatgaagtgcacacccactttatatggtagggatggaatgccctgtaaagaaggaaaatagatgacttagccacgagtaaaccccatagggctaatgaatgttaaccctttatctctgtgcccccgcccccgccccacatacacacagacacatacatacatacaccatccaacagcactgagtagtgccctatcctcgggaaaagaattccacagatgccttccccttaagctcttcatccttagccctggtcttggtcttaggcacatatgtttctgttatcatctgctggtgagctgtgaccgcaggtagaggccagggacctccctgaaggcgcacacagccacagttgttttccttaattataatctgctcatgaacatttcttctgatgtgactagaggtcctgtgacccacccacccctgctagcacccctgccagcactgcccattcacctattcggtggactggatttatttctggcttgggtggactcgagcgtgcactattagcatttccttgtggagggagtgtcatggttgtcgaggcttgtgcccgtgaaaacactccataaagcatcctcctcctcctgtagaacaaggcatgttcttcaaggaaagcattggttctttcatcctcggggcagcggggaaagtaacaagccactggtgctcagatctcctataagcgttttacgtgctgtagagcatctgtgatgcgctaaggaggggaacaatcaaggaccatcaaacagggaggccaggcttgcccctcggtttgttcccactaagggagtgagaagcacaacgtcgctatgcagactgcaagcgcccagcttctggcacgtccagcttgtgttctgtgacatatgcaccttactggagtggagtccctcagagctgccttttctttggatgagccaaaggctgtgagctttagggtctgtttttggcagctgagccttctgcccctgcagcctcctgaggtggtgatctggttccagcttgggtcttccccacctcagtgaggaggacccaagggagccgaagcaaagggcctctgctagcagatgcatatgaaatttgggatctgttggcatgtgcttgtaacattccaccaaaacatgactgctgttttcccgtattttctagtgaccgaattgcaagatactattattactggcacctacggaaacaggtgctgcactcccagtgtgtgctcagagaggaggcctacttcctgctggcagcctttgcactgcaagctgacctcggcaacttcaaaaggaaactgcaccacggagactactttgagccagaggcttacttcccggcatgggtaggtactgtctggattctccatactgcctgttcagacacaagcctcttcaagagatgagcctgcatgttctgggcccagggaaatcgctgtgatgcccaactaccaatcggaggctgggaatctttcctagtctgctcatgactgaggaggctctctggccatcttaaatgcagaagaacttcagcttacccagccccgtgttggaatgtgcatagcagtgatactctggggttttttgttttgggggggtggcggtttgttttgttttttaagcagggtttctctgtgcatcccttgctgtcctggaactcactttctagaccagactggccttgaactcacagagatccacctgcttccacctcccaggtgcagggactgaaggtgtgcaagcccacgcctggctagcggcgacactctccatcctcccggtgaattgtatttttcccctttgagggaaaatgattacttctcaagcgatgagatcattcacagttttaatgggctgagaaaacaactctgaatcaacatttggctctgacctctgtgtccttccctgccaggcgaggagccgtccccttctgtcaggagaagatagatagatgtaggtcattctggcaggagtaggctcacacacatgctccgtagcctgttggggttgccagtcctcctgcaggccgctctgtccctctcttctgtggcctcggctctggctcaggctctctcccctactgttgatgttcaccggaacaatgggtcacctgtgtccacaaagcagaaccgcctggctggcttcccaaaagataggccaagtgtgcttgactttctggcagcttccttcccatccgtgtgcgttcctcggtcctcttcccccacctgctccccttcaggcaagcacatgccatctctcgggtcattcatgccctttatgttgcctgattcagtaggcgctctcttctccttttgctgaatttttctgctgcccttggcacctagccacttacaccagggagatttcatcccaatcacggtttttcatgcctaccttcagaatatgcaggtaatgcctaaatatgcctgccctgtacagtgaggtggctactcattccttagttccacagactcggaacacccccaatcacactcctccctcccccacctccacagaaacagccctacctctgttcccctgttgtcagagggctggaggctgccataggcccagttgccagaacctggcatcacatggacttggcttggcactgtgcctctgccacattcctacccacatgctctgatgtgcccactccatttcctgttaccctgcttagtccctattttgtcactattggtttccttctaagtctactgcatccttccgtttggcgttccctccctgggtctcagagctcagcacagtgttgcagagctattcctgcttcggtgtcccccagcttgctctgagaggagcgagcctcttactttacacagtacctgcaggaactccccagtcacctgtggtgtgaagtcctggctcccaagtgtgcaactccaggatctggttgatttcttagactggatgctctggcaccatccagctggtgactctacagatgtgtccacacagctgctggggtgccttaaacttctgaacccaccgcagccccaagcagggtttctctctgcagccccagcttccctgaaactgcctatgcagaccagggtggcttagcactcacagaaatgctcctgcctctgcctcctgagtgctgggattaaaggtgtgggccaccaccggcctccatgtagaatcctttgtgaagtatgaaaagtaagcaccaaacaacagatgctgaagtcacgttagagctgaaaactcgccagtgtcccccactgccaccatccgaagcccttgcttctgctcgtgttgccactggctttttgtgttttcagacccttctgaaatccgcatggccattcccaacaccctcagtatgcagccaccgggtgcagggtgtaactcacatttgaaaactcagtggggggctggtgagatggctcagcaggtaagagcaccctgctgctcttccggaggtcctgagttcaaatcccagcaaccacatagtggctcacaaccatccctaacgagatctgactccctcttctggtgcgtctgaagacagctacagtgtacttacatataataaataaataaatcttaaaaaagaaagaaagaaagaaagaaagaaagaaagaaagaaagaaagaaagaaagaaagaaaggaagaaagaaagctcagtggaccccatccaattctaagccccagcaaatcacagggagggcgtgttgaatcgaaaccgtttcctcctgtgttttcaagtagagttcctggcctttcctgtgaaaaccagtgttccaaagagtcccgcctggtcctttaccttccccagatgaacgtttctagtctcacgttctgtgtgggggattgtgggagttagtgggacttcagtcctgcagctgttccctgacatcatttcttcccacagtaccatcgtttaagagcgtaatccgtgaagtatgtgaaattacttcagtttgcgtgggacttctgctcacgtcggtgactctttaaaccaaaagaatctgttttccccaattacgattgtttgttctaccaagtgggcgttatatcttacaaccttaactggttcctcccggtagcctaagaagacagcgaaaatgggataaaaattagaattttctagtgagaagtatccagcttcatgtggcctgaattagcttctcatcctcttgtcggttggggcacggtgtccccacaggttgtttccaagcgggggaaggactacatcctgaaacacatcccaaacatgcacaaggaccagtttgccctgacggcctccgaggcctacctaaagtacatcaaagaagccgtccgactggacgacgtcgccatccattactacagactgtacaaggtaggaaaaccctccttcctgcgcgagatttcagctcgcctgagaactctgctttcctcttacaacaagctgtgggaagctcttcttttggcctgcccttggttacacgtgtcaggcctccgtggtctagcccggaagcagcatgttagagttcttaaatgtttgtaacgtgtgataacgaagggctgcgatggtgatctgcctctgagggccttatgctatagttctttttctgcctggaagagtaacctttgcaagatgtttggtgaatgttattgtagtattgccctgtgaaagccccaccctcattatattcctttaattgtgggaatgttcccaccgaccccagtgcagacagagcaccgtatgcctcctttttttccttcaaacccccacactgtataaaaagtgatcattttataagccaggaaacttgaggcttaaaaaagttaaataattcactaaggttgcaaaaccaagtggcagaaatgtggattgcagcccaggctcctgggtgacagagtttctgtgatcagttagttgcctcagggactcgggtgctccgtattctctttgcatcctatgtatcccaggcctcctttccacagagcgctgtgaagatgctctgcacactcatgctgggcctcagcgtgctctgccttctcttccgtgctcctctctgtatcttccctatcctgacaagggtcattcctgactagaactggattcttctaagtactcagggtatatttgcaaacccagtgggacgaagttgttaaaacatggcccgtggggtctgaccgtgggttgaatcccagtttggctccttactatgtgacccaaggcaagcatttaacatctctgtgcttcagatttctcataggttaaaggacactgggacctacctaccccttaggactgtgggaattgatcagtgagccatacctgtcacatgacaggcatgatgatcagcatgggattttgttgatatgttggttgtccctaccgcaccccttacgctgagttaatataaatgggaccattgtccggggagaatatgtttggtcatattgctgggtggtcatgttactaaatgtaacttcctggctggttccaaagctcagaacactccctctccctccctccctctccctccnnnnnnnnnnnnnnnnnnnnnnnnnnnnnnnnnnnnnnnnnnnnnnnnnnnnnnnnnnnnnnnnnnnnnnnnnnnnnnnnnnnnnnnnnntttcattctgacatctcactctacacaagaaaaattcctataagtggcgtctgggacagtcggctcctattctgaagtatattagaaatataaacagtacactggacagagtccggccttgggatgggatgtcagttagaggccctggggatctgggcagctgtactggtcatgggccatctcttgaataagggagacactgcactgtgaaggccagaggggtccatgcagtaactaacagtcctgacacggcaaggcaggacgcctgtgacatcagcaagtgttcagaacgtatcgctgctattgctttatttgctagtttaaagaaatctgattagaaattaatctttcaataaaactgatgtgtacaaattaatctttttgaaaaaagaaaaagaaaatttgcttagtatatagttctgcattgtatagaaaatatctgctttaaaaagacatttaacaaaagctgtaactgaagcggggagatgagttactggtacctgacagacaccgcccacttggagaagtcaaaccgttgcatctgactcacatacgggcagctcataaggggaagcagaccgttctgaaggaagcaccttttgcctggtttcccatacacgtctcagacgtgaactacagcactgccttggccccaggcttacttcagaaagcgtggacatcgcctggggagggaacctgccctgagtgtgtgctgatggagcaggctccgttgagcccagcactgcatgtgcctttccatgccagagacaggccaggcaagaccatgctttctaatgcttcttcctgtgatcctgagaaaactggccttaaacttaataaagacccaggggctggagaggtggctcagtgctttggggtacttgttgcgctttctcaggacatgggttctatgcctgccatccaagcagtggctcacagccatcattactccagttccagggcgtctaacacccacttcagcttctgccagccctgagtacatgggtggtgcacagacatacagccagggaaaatacccaggcatataagataagccaaagcatcctttgaatttaataaagatttgacaatattcatctattgtcttataatatctggtaaaaaaaaagaatatttattagtaacttttaaggcttcatgccttactcattacacataagtccttgaagattggccaaatctgagcacgttttttaattgtactgttttttccttacagttaaaatggcttaaggtttatcatttatatacacatatacatacacaacggaatgtatatcatatcagcaattagtaaaatagcactatcaaccttctgagggagagccctcggtgtttggtcacttgtctgtcctttttgaatcacagatagggagctaggaaagctacaggatttgaaaaccataaagtcagacgcagctcagactgtaactggacattgccctgacattctaacatccacacattcattaagcacggggaaggtaagaacgttcacatggcgagggcagcgtgcagtgcccatgtgctggagctctcagagaaatgtgtacctagagtagtctcagaagtgtgcatacagcgctgaactctaaacctgaagtctaaggtgtctgcaggagaggatgcagctgggttagcaaatactcaagatttttcttaagtctttcaggaaacaaagactgtggaaagatttgataagttattttaagtaaaacaaaaaaaaaaagaaaaacaaacaacttacagttctgaaatgtctttttcttcattgttcagttgtttattatagaagggaaacatgacttttcataaacctttattctgtcaggataaaagggaggctgaaggctcactgaccctaggactgaccatgcgaggaatacagatttttcaggttcgtatcaaatggtgttgggcaggttttactacagagaatgcttgtgtgacccccaccaaagctcagtcctcatttcccttttgtcagcacagaggtgggtgacttaagcctgtggatggcgtggctctgcctgcctagacagtagtcagtccttagcagaaaatgcagggtggacgagcagcccgggcttgatacccgcagagtgtcactgtccacacgttgccccttggagcttatgaattgtcgtgttcttctctcctaccttaaaaagcaccacccaggaacttcagcgtgcattacggttgtctgatacacatggtgtcccataaatgggtggggacagtgttatcctttagagattaggaggaggtagctccctgtgaggaagctataaagatgtcttatcttcctggtgggaaaatatccaattctggaagtctcagtcccttctcagttgctgcgtgtctgagtcctttggacttcatatttaaacttagaactgagtgacagttgccttcggaagccagtgcatgcagtgcacaggggatgcaggctcttgtcgctgatcttaattactgtcggcccttttccaaaaaagggctgaggactgtttcagatttgaattactgagttttagtttgttataagtcaagacagttttaagataatctatcccatttcccctaactccctatataccgaaattctttccacagaatctagaagaagagaaacaattgctctatgatttcccctggacaaatgttgggaagttggtgtttgtggtgagtgagtgtacagtaacttaggaaagaggggtgtggagggagggggaaaagaagtctcatcgttgattttgagaattttggaggtttcactttgaaaatactgtttctaaaaacaaaagtagtctgtttatttgaaaggagttggggtgggttttgttttgtttttaagtagaagctaggggcaggtgaaatgactcaccttggtgggcttgcagccaaacttggcaacctggattgaatcccttgaacttacaagactgtctctgacctgcccccatacacaaagtggcttgcacacacacataccccagcatacacaaaataaataaatgttaaaaagctttaaaaaaaaaagctgacattttgcttccatgagtatcctcataaccagttatttatgtcagcagcaaattaaaatcaaagactataatctctgcgtccagtgtctgccacactgtcttaagtaactggaattgcagaggaggaaagagaaggggaaatataaggtaaatcgatcgaatagaaccatttaaaagtccacagcagccggcctgttggcatgcagggtaaatgaggcagtgtggaggctggctggcggcctcagatggttcttagcgcaagtgaaggatgaaagtgacatcaaaagatgttcccattaatgccggttattaacattcaccccgttgtcatcttcagcagtctgctgtaagcagtagggaagcgcttcatcttcaggatcttgagggtgaggcaggttctaggacagtcatgttctccgtggtaacattcaaagagttgcagtccctgtcatctgtgtctgtttggaggtcactgaaatccacaattttactgagctctgaagcaattgagaaaagtggaccaggaaaagcggcagctggggacgttgtagacatacattcctccctgcagacgagagggcctgtgcagatgaagggccatcttagcttgttggcctcacactggctcctcacagcctgccactcagaaggcccaactctgcatagttgcttgggtgtcatctgctctggcctcgctcacatgtaaactgcaacatgttctgcccacactccacaccactgctgccatggtctggaccttttccagaactgtgaaaatcagagccaggccatggtggcgcacacctttaatcctagcacttgggaggcagaagcagatctcttgagttcgaagtcaacctggtctgcagagtgagttccaggacagccagggctacacagagaaaccctggctcaaacaaaacaaacaaacaaacaaaaaactgaaacttgtgacccagtttgccctcttcatggcccagaatcagtagtgatgttaagactctctagggcaccgtgatcatcgactcctgaaactcacaccacatcactcttagttaagattttgttgaagatgacagatctctcagcctcattcctttcctcaagggatttttgatcctgagattctagcctggagagaggaatccattttgaccagtttcccagtgcagtctacatgtgtgaccttgagctagtgactcggtttctctcattcattcttggaccgttatagcaagcttttcactgtagatgtcttgtgaggattaaatgaattgatgcctgcttagtgctcagatattgccgtcccagcattggggtccaataaattgaagaaccaatgctttaaaagaaaacgcacagtctatttgtgaactacagtccactggtgcttggcctcagctccatttcttatttgctacattcaggtgttaggattgcttctggagggaggggtctcctatgctaggacaaagacgatgaacacgcccaacccaacccaccctccaggtttcccagaaacccagagttggtgtcccatgtcctttgacggctctgatgaggaaacatgtccctcagaggatggtcagttgagcttcacacgtctataagaatcttactttaaatataaaggggaatttggcagtttgtaaagttttctgccacagtctgattagcatgtttcctccacagggcaagaagtttgagattttgccagatggccttccctccgccaggaagctggtctactacacagggtgtcccacgcgctcccggcatctcctgcagctcctgagcaacagccaccgcctctacatgaacctgcagcccgtcctgcgccacctccgcaagcaggaggagaatgaaggtgagacagtcatggtcatggcggcatgagtcccagtccctcatggggaaagcaaagggtggcttgcctcagctggcctctctttatgagatagaatttctctgtgtagccctggctgtctcggaactctcgatgcagaccaggcctgcctctgcctcctgagtgctgggattaaaggtgtgaagtacggtgcccagctgcctctgctggcctctttctctacctgccaggaataggaaaattttaagaacctccagaatgggatttttagagacatggaccagaacttgagagccaagttgcattgagtttgcagtcctgtagggatgaccgagcagctcctccacctcatgtgtttagagtttctagcccctgacttgaaaagcttgcaatgggctagggtggaagccttctgtacccgagtgctgagtgttcctgtctgcagctgtctgcaggaagttgtaatcccttccagtgtgacgctttccttagccccaagtgagagtgaacatagaccacagcttctctgattgacagcagggagaccctcaagctgaccctataataataacaatggagaaggccttttccatccaaggactttgcccaagcccctgtcaaggctttgaggagatgtgctggacctgaagacgatctttgaggtcctagcgctgttcctgagaaggggcaagctgtgctgtgggaggaaggagcccatgttgggggcctgtggctgctgacgagtttagcagtttctgtcttggtcatcagttatggcgccctgggcctcctccacttagtcaacaccagcttctcatccccaaaggccttgtcacatatttgcttagaattgctttcagtttgttccgcaaaaatcccattgtggtcattgtcacagtaatcagattagagatggaatgtctgcctgggccctgggacacagtgactcctgctttaggactctatatgaaacaagtgctgaccaatgctcccatggagagcaggggctgtcctccctctaaagaagacgtgacgtgcatctgatcaacttttctaaagccagacatggccagatgtgtgtgaagaatccctgactgtacagtgatgagaaggcgagtcacccactccctgccgtctgcactgtgactcttctgtggcaggagctagtagcactgtgaggtgtagtggcttctaccgcagactgcccgtttttcccagattgactcacctctgggctgacatgaacactaagaggaatccagacaaatgtaccaagagggagcctgtgagacagatgagccaactgggtacagagcccatggttgttttccaaatgtagctcattgctaagtggctaccatggcaccttaaaaggttcatctgtcccatcagctctcaacccaaagcatttagtaatgcagatgaccttaaggggagcccttgagagtctgatcttccctgcagagataaggtaaaagttgagaaagatgctgaggtcttggaggccagggcatcatccctttagcgtattgggagcttaagtgagcaaatgtctgttcactctgccaccataacagaacaccccaggctgctgatgcatagagaatgtctggcagggacttcctgatgcatcatccgaagggcaaggagcaggcacaggagagtctaggaggcctctcccacggcggcggcagcaacagtgctgttcctgacagagctcccacagcctagtcacctctgaacagccccacatctcactctgacacagcactaatgaagttttagcctgagtttgagggggcattcagagcacagtaggggtggaggagtgataacggtgtaaactgcagtgcttatttggtgagtttaaataaatgatagagacaggattcttacaaagaaaatatgtttgtttgtttgttcatttgttttacttagaggtatcttcagatctgaagaaactgtcacaccaagtttctgtgagctagctttgctgcagatccactagtccacctgtagtctggattattttaaccagaaaagcccttttatggcattagttgagcataaaaagaaggagtgttcttacatttcacttctatgtacctttctaagatactgccgtctcgccatttttatagacggtgatcacaagaacactgccgtgggggtaagaggggaagaaagatgccttgagtcatgaaaacagttacagttaggctgcagttcctagaacatccatgggtcgcaggccaagaagccacacttactacattatattccaaaacagactctgtagagagcatgggtatcctggcaatatgccttgtgctcagaaggaggcacagggctgcatctgccagacctctgttctctcttctgccacccattttcctctggagagcaggtgggggtgcaggttcagggctgtgtgcagacatcagggctgcgaatgaccccacctagccaagaagcagggcaagtatgtctattaagaagcccccgagattccagctagactgctagtctaaaattacatcagtttaatgttcctccaatgtactctgtccttagcattgctctactgtgtttctttctcctcagtagtaagacaaggaggatagactgtttctctgacatttttctcacccgagatgtaataggtattccgctctgagcacagcgccccaccaccaccaccaccaccaccaccattcagctgagactcgtaactttgagtgtgtttagctcagtgtttgtcaagaatgtttcttaatgtctggctttccagggtctgactttgaccgtatcaacaacaacactgatctgttaaatttgaggacttttaccaatcagagggcacctggtatgtccctaaaccagtaatgatgaccatggtagataacgcctcattgtttggccaaacaggagaaagccagtcttggattacttttgaaaagctaagttttagagtcttcgaaagagatttcctgaacaactctgtcttgttaggtttagcacctaaaggcatcaggagccaaactgaacatagaggcatgtaacatggacagcagtcagcacactgacagagtgtggaggacctgattgtatgtaacatgctgttttctgacagctttgcagaattcggaagcctgtcgtggctgtcctgcaatgtcgagttgctctgcaaggtgttaggtgctctcagttttgaacttgtatcacattggacggtcgcagtgaacagacaggaaggggcatgccatgacactctgaggagcccacttctctatattgaagcttcattctaaagcctacctccacccagaccccctgctctgctgccctggtgttttctccttgtatagtgttctgtgtcaagctccagttcccagaatgccccagtcactagatcagagaggctgcccttgatctcagcctgacaccgtccgtggcctggcttggtagagtatgccgctgagctgtgttctcccacacagagaaaaagcagtaccgggaatcctacatcagcgacaacctggaccttgacatggacccgctggaaaagcggtcccgagccagtgggagcagcgctggcagcgtgaagcataagcgcctgtcccgccactccacggccagccacagcagctcccacacctccggcatcgaggcagacaccaagccccgggacccagggccggaagacagctgttcaggcagcgccatgcaccggaagctgaagacctgcagctccatgaccagccacggcagctcccacacctctggggttgagagtggaggcaaagaccgcctggaagaggactcgcaagatgagggtaacttctgtcactacggctactcactcacgtgttggtcttgtagccctgtcgtctgggaagtaactaagtgatgatgagagagaagtcgtctttgctgcctccccagtgacctgattgtgttgcctgtgtctgttacggacctttgcaactatagggttggcggattgtgggacatgaaggggacagaaaccctgtagcccttatgccttacgtttctcatccccgtaagaagtgaggcagtggttaggtccacagcgcccagtatcctcctctttctctaaaaaagaaaattgcatccagtacatggtattaactcccaaagtgtttcttgagggctctaccttttaaccaaaactacagggagtatagaagaactacagaacctggctgccaggaaattactctccgctgagataaagtaacaggtcccagcttgtgtcaggcagatttagcatccatgtgcttctttttaagcccatttctatttcacattagatctatagcatctggggttgatgaaaaaagcctattaactctcttaagaaacactgcacggcaagtcaggctcctgagtgcttcctgcagctctgaggcagctgccgtgggaggtgggtgggcaggtgggcgtgggtcagcagttctggccccagcgctagtgacccatcagcatccatgggccctggggcatggcagcaagaccatacagcttctcctcttccttagagagtagagtaattgatatcaagcatggcgtgagaggtcgtgccgtaacgacagttcagaagggagcatgtcacactgagaattcgtccctagggttcccagatgtgaacgtctacctggctgccctcacatgtgtgctgtggctgtgggctgtggtcttcgtttccctttgggtcattaactgtcttcttccccgcctacgtctcagaaatcgagatgctggtggatgaccccagggacctggagccgatgcctgaagagtcgctggaagtcagcccagagatgtgtatctacatcacggaagatatgctcctgtcgaggaagctgaacggacactcaggtgagctcttagggcaagctgttgcctgcagaagcccccaggcaggcacctctaaaaataggacggtggtggggactctgaatccaccagggagaagagccactgcaggtggcctgatcccgggccaggtgccttctgtggaagagatgggtgagggcaccagggttgtatcaatgttctgtagtgcacgtttctctgaagccagcagtgtgggtttgatctaagcttttaccacatgtcacgaatcagactcctctgttgctcaggcttaagacttggggagccggcactgggaaggggccctggacggttgtccttcagccactgtcagctttgagcatcagttgtcagaggggaactacacagacacacggctgctgccatcctggctcttcctggacaagagtacaggggacagttctctgtgggagtgcattggctcactcagcccaagcacagcttgtagacgttcagcctgagccatggtaaacaggccaaacctgtagatggggagtcctcgcccccaccacaccgggttcatgatgctagaccgaccttgattctcctacccattctatttattatattgacttgtctccttacatattaaatgtaaaggaagtgctacatgtttgtgtttgtaaaaaggaaatgatttaaagtagcatataccaaaatgcctaggaaagtagagtacatgggccactggaaagttcctcatatcatgtttctgcattcagttttatgagattattaattttgtagtttcaaatagaaatataatttaaatagaatgactattaataatattcaataaacatgtatatgcctttttaataatgaaagagaaaacaaacagtggatagttgaattgcctgatcactagacaccagactttacatgagatttgccaaaggatactatgcagaattcaaaagctaggccagaaaagcacaaattatgtaaaagtgatgtaactaagacacagaccatgtaaaatgtgactttggggccttggggacttccaggattttccttgcttcaccctaatgtccagcatctctgccacatgagccttgcttttggaccctgacctcagattcagatggaggcagccatgcttgagttttgacttctttagtggtgatatgagcttggaggagatcgttcgcaggcagaggagccaaggacaccagagagcccacacacaatcaatcatactgtatccctgccagtgcagagcccctcagtcctgtgggatctggggtgcacgctcctcgtgagtctatagagcaagcttctggcagtgcagtgtgtaccacgcccaaacgtgatcgtcacccaagcgttctaaaccatggtgtgtgagccagaagcagcttcacaagtcactgcgttctgtgtatttacaaggtgcgtgctaggctttgggctgctagcagtggctgagtaaaagcttcctggaaggtgggggaccccgcccctctgaagcaattgtccttatgcctgtcctgccagtcctcacttgtttcatcaactggcaatgaaaactccagtggtgttcagtctgatacccagctggagctggaaacatttttttggagagacacatcacttacatgctaaagtcagaatgtcagccttagatttctagttctgaaaattgaggtttcctcgcagcacagaggctgtgctgacctctgagacccagtgctcaattctccatgcgtctctctgcatcctaggctcttcccactggcgtctgctgtgggggcggaggtcacagtggtctgttgaccagcaggagcgcccaacccttgtgggccacaactctttagtcatccctgaaaagctagttgagagtagcccggatataaaaggaagctaatgagatatgggacggattaagaactggcctggatacacaaccggttaattatctgggcagattccagtcctggctcatctgactgcagaggtcagcatcccacatctgtccacgtggaaacaaaactagatgatattggtgctccactccgagatgcgtggagagaagggagtcttgcagatggggtaaagaggcctctttacagctaagacctgcatctaacattataaatggctcactcctggacctcgctcccccagccgccccgtcctagctgtcccttgcttcctgctaaggagtgggcaccaccagctgtgaggcacagccaccactcccaccggggagtcacttgaggcctcagcagtgctcacagttggtagtggtacttgttagagaatgcggagagcggtgtgaggaggtcaccgtgttttctcttttacctcagggttaattgtgaaagaaatcggctcctccacctccagctcttcggaaacggttgtcaggctgcgtggacagagcaccgactcccttccacaggtactgtggattgaacccttcattgtagcagctagagtaacaggcctacttacgtcagactgcgagtcatgcaaatgagcaaacactagccagagggaaaggattcgtgacatacatcctcactgtctgctgacttttttcatttcgctagctagttccacttacatttgggttttgatttggataaattgtatgttattgcacgctctctctagcgccctctgggtgggagcctctggtcttcaggcttctggttaactgagtatgtacacctgagcaggtatgtctgtgtctttgtctgtgtgtctgtgtgtctgtgtggtgtgtctccgggctgactgactggtcgcctcagcaggtgaaaaggaaaggttgctgtttgagtgtgctcattgaagagcagtttctaccccactttgcctttcagattgaatttccaaagtgtgctttgctggactatctgccagctgtgaccactgagtggctcaacactaaaaatgtattatattcttcccccttctttctttgttctttcttttctctctctctctctctctctctctctctctctctctctctctctcctctccctctctctctctccctctctctctccctggcatcctcttactttctcctctaccttttacctctacttttttttaatacccattttttgtacttctataaaagaagccatactgtgaaaatgacatttactaaatatttttctaaaagtcccagtattaaccagtatgtatggcatggaaacttagaggccagctctgccagcccatgtatgccgcactgcacacggtcatccctggacatcacaggtgtcgcagctgagcataaaagaccaaacctacaactcttggccatttgtgtgccttgagggtttgtggcaatgcccaaataatttcacctctgagatccttttgagactttggggagactactagcaagttaaaggggttattctgaatagctgatgtcactcaaatgtgacactttgtagcaaaatgtgttcctataacttttgtgtctagcaaattggtgtctttttcccaacaagatgtcctttgccgtgctaaccagcaaactagcctgtccagtttctcggctgctcagtaacatctcccatgtgtggtattacctgagtcagcttttaacttctctcttttccaccaagaccactcgggatcatgagttcaaaacgccggccacccactggtggcatttggtagcacaggacctctttgagtgaccacaaactgctgctttttttattctgcatttcaaaaattattttttgtgtgcgtgtatgtgcatgtgtgtgcacacgcatgcaggtacctgtagaagccagacgagagtgtcattccccagagactggaatcatgagtggctaagagcagtgctgtgagtgcttgaaggtctaccagctcgtctgcaggagcagcggtactaaggctaagccatctctgaagccccaatttcttcccagcctttggcagccagaacactttatgtcctggactctttaaaacttgcttcttcaagctatgtttcttgagtgataattgcttttccatttcttattaaaatattaacagacccaagcaggaaaggtattagcaagttgaactgccctatcctgattcatgtcactcaatttcacaaatgctaggagtgtggcccacctgactttgtgctggctgtatacactaggaggatcgccacacagctgcctcaggcattgtgatatactcagagttactccccaagaagggcacgcacgggttggaaaaccatttctaacatgaaaggactacttgacattttacggtttgcagcagctgtctctgctgggcagagacgttaccttctcacgtgatccataattgcatttttctcacccttcttttatcttgcagacgatatgtcgaaaaccaaagacttccaccgatcgccatagcctgagccttgacgacatcagactgtaccagaaagacttcctgcgcatcgcgggcctgtgtcaggacactgctcagagctacacgtttgggtgtggccatgaactggatgagagcggtctctactgcaacagctgcctggctcagcagtgtgtcaacatacaggacgcattcccagtgaaaagagccagcaagtacttttctctggaccttactcacgacgaagtcccagagttcgtcgtctgagtcgcccctgcgggcagccctgcgggcagccgctgtctgctggaggctgtggagtctgagggtctttacacattatttgtgccataactttttcaccccaaacttagctttttctttatagtattcgagatggaaacaaaagccttgggacagttgcactttaagtattatgcagaggtaaaagaaacagagaatgtaagaggaagacaagtgcccagattgtctattgcccctttggaaggaagtgtgctttccagctttacccagatttcagactgtcagactgcagtgtgtttgttcatctcttgtgttccggttcaaatttatgtttatcacgtgaaagatgttataggcttatctgtttgcttatgggtttttcagccacttcctcatgaggcacggtttgagggggaggacaaaggggagttctctcttcttttctggagagccattcttagtacatagccattgttgcctcacagaggttggtccgaaatgaacactgaagttggtgggagtcttatgttctagccaaagatgtgtatgtgatggaagatggaagccccactcagagtccagaaggcgtgtgccgggacactgggctccttcacaaatggacagtgctctgtccgctgttttgttcttccatgaccttcccaggaagctctgggattggcctgtgcttgtgacatggtacattttgcagtttacaaagctggtgtatgttaacaaccattgggaatgtctcagaagacatttgtttggttgtatttcctttgttggtttttaatggtggccaacagatggtgatgctagtttctgctttaacaagatacccttactgtatgtatatgttatacgtatctagatacgtgggactctgtgtgtttatgtgtttgaagcttagtgactcttcatttggacttcagtatatgtcttgcacacatagaatttcttgtttaatgtcaaggatgcttagacacagacaatcagttgataaatgtagagttaagagtgacttttccatgtgtgcctttggccaagattctcaaccctgattgcataatagacttgtccagagagcttttaaaacatgcccgggtcccaccaggccagtttaaaccagtctcctgtggctgggagattgatttaaagtgtaccaggttgagacagtaatgcacagtaggattggagatccaagagtgtctttctattcattttgaagtaaaagtatacagaaaatattagtgatagagaatgggccacttttaagacagggcctgctactgttacagtgtataatgaagccaggagaatgagtttggtcaacttgatatccattgaagacgttgctcgcccttcaggagagaacttcatagcacaatgtctttctaggagatgtttttaatgatttagtattttacaacatttgtttaccatattttgatactccatttttgctatctgccaggttttattaaaaagaagactatgtattattttctaaagaaactcatatttttgtacaaacttatgtttccaagtaaggaagaaatagatgtagggtcaggcagaacatagcagtgtttccccctggctaggtcagtgtcccagagcccgtggtggccacagacatgcccggtcaccatgctgccctcctgtgctggcacggcctcagcagggtcacatccagtaactctcacctgacactaaagaaggaaaaagaagttctgtgctcatgactttattttgcttttgttgaatgcttttagaagaaccaaagtttcagatgccagaatgtataagtgtctcagtgtccacagataggcaaagggcaaaggggtccgtcacctgatggcttcttttgcttccgagtcattgcatagtctcatcattgctcacagatgcttaggggccacaccctggtgaagtacgcgatctccagagcacagatggccgtgtattcccacagccctcggcatctcttgcagatgcagagatggaaaggttgcttgcttggctgtgtgctttataccttttttctctctgctccagaatccagtcttcagggttctgcccaggctgtcgatcgccatttgccctcttccaggcagacttggaaatagtcttaaagggttttcaaagacaagatcagccaggaaacagtttctcatttctgacccacgggagaatcatagacatatatgtatgtggagctccactttgaagaattgacattcttgtattgggcagtcgttttccaaagtaaaaggaggaaagtataaagccgtcactcacgctgcacttgctagcgtgtccatggctggcagacgcaccagtgcatctgtcacctccctgcgtcacctgcatctgtatttgcaacggtgagctttgtatctaagtaagctgtaaacagtcctttctgtgaaaggatcatcgtgtcgggatgatactgaaagtatgtttaaaaaaaaaaaaaaaagctacggcgttattttgtaattatttcttagaggtgtttcatggtatgcgcgaccatcaataaagttaacttttttgcctttaaggtgtctcttgttattatacgtctcaaacaggaaccagaaagaattcattgtatgctttttttctgaacttttgtcccacgatgaataatatttaaaacaacattatgacgatggagatgctgagttctggacaaaccaggcctgcattaactcgtaatagaacggcacatgttgattgtaatgtctatggggcagtgattactgccagctaggagagccagcaaggtttcaaggacttttccagacactggagcagtctcatcagaggctaaaaggactagttcagtgtgtgtgtgtgtgtgtgtttgcatgtttacatttttatttatttattgtatgtacatgtgggcacacacatgccatggcacctaggtagaggtcagaggacaggcgcagacactgatccttccttccatcacgtgggttccagagatagaacttggacttggcggcatgtaccttggctcactaagccagctccttgactctaaaggagctactttaaaaaaaaattaaaacaataacttaaacgtagtcctttaaaactgtctgtggggttttggtttcggtcatttttatgtggctgcattcacaaggctgaaaggtaaaggccagggccatgaagggaaggggtcaagctgagcctgggtggctctctccaaagcccagctcattctcgaagacaagaaagaccaaacgtttcttcactccagttttcttggctacaaagtggcagtaataattccaaggattgtttgagaaattaaattcgatgtctctggtgagtagggtgagagacgagggtttcagaacttcaacagacatttagctcttaagaaacaccatttagcagtctagaatcccaaatgagacataggtgcatgaatactttgcatgttgaagttaggcaccgtcctagttagggttttactgctgtggctagacaccaagcaactcttacaaaggcaaacatttcattggggctagcttacagtttcagaagttcagcccattatagcatgaatcatggcagcatctagtaaacatggtgcttcggaaggagctgagagttctacatcttgttccaaaggcaaacagaaggctttcttccaggcagctaggaagaagatctccaagcccactcccactgtgacacacttcctccaacaaggccacacctcctaacagcaccactcccttggccaagcatagtcaaaccaccacaggtacagtgactctcatttctctactctattcagtcttggctgcttgttacaaagactgtagagcagaaaccagccatggccccaggggctaatccagagagcatcggatcagtcttcatcctgagtggttctgcaggggaaacggatgcacgagagatgagcctgttgtccgatagctgaacctgagcactaatgtaccagccgaactactgccgctaaaccaccatgagccttgcttgggatgagcaaggtcccgagagcatccaaatgtattgcattttgtgagagtgacattctttcatcagcagagctgctagagttcagatgaggtaagggactcgatgtttcaggacttgtggatacatccaccctttccaggtgagagcgttaggtactgtttagctgaggacgagggtagggactagggagtgctgtcaactgttcttaaatcccctgttactgttttatttgcttcatcgtttctcagacgctttgtgtaggccgatccccaagcagcggataaagaaagtgagctactccacccagccctttcattcttaagtcatctatgtagagtcagcagaggaacgtgacttttgagaagatctgcttaaatgctctgagccattgtaggtgacaaagttaaatacttagagattaatggaagtctataaacatgggagagctataattaaccaactcattacatagggggggtgtttacccatccggtatcaactgcaatcagctgaggtcgactccaggtattgctctccttattgccataggttgattttgttagagcaaacagctttcaactgggaaaggaactgtgttccaagtttacttctaaactgattagctggcatttaagacacatatcccaaacttcctttactagcctgaaaaatgcctgttttatcccaggatactgtcaaaggtttttagtttagatgattggttttggttttgtcttttgcttttaccgttggttggttggttggtgggttggttggttggtgatttggttttggctctttgccttttacctgccttttaccttatagtaaaaccatctgtcaaagaaggtcagtggagtggccccacgggcagatggaaagatgagagcagagcccgcagggaaggagtgcagtctcggggtttacttctcagggtcatactcagctaggacacacagaaaacagcatccgagaagcaggccggatggatgaagcgcttcaaaccctgtcgatccttaggttgaacactggtcactgttacctcatccctgccccagttcagagcagcacttgaagatctgccgccgtggtacaatggtctagaaaaatgtaaccttctgatccacccaccgagggaaagggaggaagtggggttaggagttgctcctgggattctatccctgaattgtcccaggggaggtgatgctttccaaaaacgttaaggagcttatgtgaaagtttttaaatgccgtatcagtatggaagtgtgtgatgattaacttttcaacttgattgggtaaaatgaaaaccctgggcatgggctggtgagatggctcagtgggtaagagcacccgactgctcttccgaaggccctgagttcaaatcccagcaaccacatggtggctcacaaccaccatgagatctgactccctcttctggagtgtctgaggacagctacagtgtacttacatataataaaaataaagtaaattaaaaaaaggaaggaaggaagaaagaaaaaccctgggcattagtgtgtagtggggattatggaattttggtttcatagaaaacatagaaatattgtaagaatatggttttgttttaatcccaggtgtggaatatggggctgcttcagactgtccatagcagctatgatttgcctcgtgcaaaaacaatgtattatgaagtttataaatgtatatgaaaaaaaaagtctgaccataaagcataaagaccaagagatgaaaatataaaatcaaaagaagtagaaatttgtttcttataaaaagccaaaaaatgaatagaactacatacctctataagtatagcatgaatgcagcctagacaacatagaagcaaaggagtatggatctgttccaaataaagagatagttatacacatacagagagagagagagagagaaagagagagagaacaagctggttttggctcccaggctatctatgatggaaaatattgattgtcagcctgaaaaagtgcctagattataataaggtgtcccccaaccccaagtatatctgtaagaacatttcagagaagattaattagtgggcaaagaactggactggatgtggggtgtaccatcccatgggctgaggcacaaagagattaagaagaagaaagtgagagctggaaagatggctcagaggttaagagcactgactgatcttcctgaatgtcctgagctcaattcccagcaaccgcatagtggctctcaaccatctgtaatgggatctaatgccctcttctggtatgtctgaagacagctacagtgtactcatatgcataaaataaataaatatttttttacttcagccttttaaaaaaactttttattacatattttcttatttacatttcaaatgttatcccctttcctattttcccctccgaaaaccccctatcctctcccccatccccctgctcaccaacccacccactcccacttcctggccctggcactcccctataccgaggcatagaaccttcacaggaccaagggcctctcctcccactgatgaccgactaggccatcctcttaaataaatctttaaaagaaaaggaaaaaagtggagacaggccttctctgtgtgcatcctggctgctgtaaagagatctgttcggttgatacccctgacacctctgagacagtgagctaacacagatattctacactagcatggtgcagagacacgacatggttatcagtgtgagcttacccgttaggtgcattgcaaatgagcgtgaaggacattgagcaagggtctgagtaaatttgaagagaccagcgaatgacagaaaaagacctttgctgttttcttctaaactacatattcttctcaggaaattagtattttagagaaacatcataggccggatgggtgatttagtaagcacgggtgtttgcagccaagcctgatacccaggtttgagccccagaaaacgcatgatatcctcccacacattgtcctctgaccttcacatacacacacataccacatgcacacctccattaaatagatgtgaattttaaaaattaaactaaatgaatcggggagtaaatgccttttagagaaaactctatcatcaatattgttgggggtagaatgtatttcacgcagaagactagagaaggttgtcacacagagaagagagagctttacagtacagagctaagtgaatgttccagggaagagttgagagagaacgggagtcctccccggaaagcagtagcaaaaggtcaagaggacaacaggaagagaaagaaaaggcgagggtgccgacatccaggacctgcagacatggaaaaccagctggtgctcatgggccagatggaaagagaaggcttgcaagaaatgactcagagggaagacaggcatgtccaaacaaggaagaaaaaaaaaaaatgcagggaacgcccgaaaaccagttcaaggcagatcatcagggaattttcaaaaaccgagaaagtctcataaacgtggttgtttcttaaagaacgatacaggaggtttatagttctgtgaagaatgaaagagctggtgatacaaattcacactgagcaaaccaaagagcagcaaactgaggacacctggtcaggtagcactgtctgctccctaccggagcagaaaccagtgcctgggggagggtgtgtgtaaaggtgcctgggagagtctcacctttgcttttagaaagctgctaatggcctaacgtgaaggaagaagcgtttagaaagcagaatgcctttgagaagtatggacataaatcctcctctgaaaccacactgtgggttgaaatcattgctgtgtggaaatggtgcctagtagtgtctttgactcttaacttatgcaaatgtaccgcttggatacaatgtttttgttgttgttgtttcttttttttttttttttttttctttttttaaagagatcaaatttatttcactcactaactactgaactgctcttagtggcttcgctttcctggaaagggtggcgttgatggggtggtgacatggcttctgtccggcaagtattgctgtgtttgggtagaaaagataggacggatgcatagcccagtgggctgcagctcctccagaggcccaaagacgcttcctggcagtgaactcggactattcagcgaggtgctgggatattaatgaaaagcctggaggggccacatgggagttgttagtaggaaggtgccagaaggtaaggcggctcccttttctgggcaggcaggggagcgtggcgctgatgcccttgagagcgatctggtttgagtttcctcactgagaacagccaacagatgggtgtctggtaacccagcgcccctgttaagaggatccaagtcaattgttccacctggcactggggccggctctgcctccagtttcagcttcaagcctcttgggggctaaggacaaaaagtggaagctgagactgtattcagagggaggggctgtagacacagagggtgcggtgcctggagttgagggaaaggatatctcaccagaaatctgtgaaccagcccaccctagatcaagggctaggaaatctaaaggaggctctgaagctacatcgggagcttttctaagagccaatcagaacctggaggagtgctgccaaggaccatgaaacccatccagccttcaactcctctcagactcctgttggtactaaacatacacacccgagccacagccccaagcagccatctctgagttctttatcttcttcttctgtccccaagttcagatgcaaagggaactgtctgcacccaggagcctgggatgaatgttgaaactctgccttttaaactggggacctgaccacctctgtctgtgatgtattggtgccacaggagcccacggaaggtgagggcgtggctcccaggtagggggcggagctccccagtaggggcggggctatttggtagggactctcctataggtcattgccattttttcattccagtcatctccagggagtgatggtgtgaaaaaggaggggcagagatcatcagggaaggtgaagtgatgaatgtattagatgctaaagattaacaaagctttctttgttctttaaaaattgcagttaagttgttcgagtaggttcagaaaccattcccctcctcgtttgcaacggcatcccaaggacctaattagtgcagggcctggcataggaaaggtgcccaattaatgctgaagttagcaacaagtggaagttctgtagccacgtgccaggaagccaggtgagtagggtagatcacaaacacgtctccccctctccactcttcctatgatccatctctccattctggtctgcgctcccgcctctactctgacagttctcgccagccctccagttctaaagctggcttctattgtgtctttaccctgtagaggcttgtcaatagcacctgtcctaacctccaattctgactcactaacccatttatttactattttctgatggttggtctcctcttacatcatcacagtgtaggctctgagaaagcttgctaatagacgtactaaccatagtcttccaggggtgcagaccagagcagcgatacaggcacccgtctgacccctcgtggaaaccctactggaccaggtgtacatgcacccctatgcagcttctgatcagatatgtagaacagcagacatatggatttagataagtgactataataacgtttggctatggtagaaaacttagccgtagatgaacaagaagaggaagagacttgtattcatcctaaattacacattttttgttttgttttgttttgtttttctgagtggggctgatcttaggatggattttgcctactcggtgttaactttcctccaattccatcctcggaagctgctggtgccccagggtggtcgtgctgtgcattgagttttcctcaccgatggacaacaagcaaggattatcttgagcagagagctgaagcgcagtacaagatggttttgctctggggaagacagaagcacatcagatcggatgaaataggaaagcagctctcggaagtgatcagaagacgctgagcactgagggtgggtggggagggcggacggctccaggtggtcttcgttctgcaccggacagtgagaattctctttcatcccggctaggtgtttatgtgaccaaatgcaattgtatgtcttcaaatgttcccggaaccccacattctgaggtttacaggcctgagggaaaccataattccgtcttgggcaggaccccagtcaaaggctcagcttagagacagccctaggtagatgtcgctcacagcactaactgttcaggactggtgaacaaaaccagaggcagcgatggcatggcgtacagattcctggtcccaccctgtgtttccaaacggtgagcaaagcaaggaattggctcttagagcatctccctcacttccttggttggcagatgagcgattcccaagcatgatatgtgggaaaggggaacggttttctggagctgtaatcagattgcaagtagcttcttttgtttctgctcacgtcggtgacaaacaggaaaggaatcctgctgtcactattgggtgttaggcaagcctgggtgggtctagatgaactgccctgcggggcagggaggacctcagtcagagctgggcttttctgggccctgcctgttctgactgcagcctgacctctggtggtcgaagagagtaatgcacaagagcagctccaggggtcaatgtataaatgataggcttggaaacgccccctgaacttcattcacagcggccctggccaagcctaggactagctaacgaggttgtatcagcgaatagattccatggtcctgtgtggccatcctttggcctggtgactcctgggttgtgaaggcagaggtcaggatggtgcccttgcagtgagctctttccagtcaggagtctggagaggtagatggtgactgtgtgtggttcatttagccagttacctaacacaccgctgaaggccttctgtaagtccagcactaggctggatgcttgaaggacaaagtaaagaaagatatgtgaatggccctctaccccggagtcaacttcagacctgtgagaagcagagaaagacaccaaacccaaaggctgtccttggcttagcgctttgatttcctgctggcttctctccactaccagtcacattcacacagaagaaattacttaacacatgaagcacttctgggaggggagttcttttggttggttggttagttttagatttttgagatcaggtttctccatgtagctctggctgtcctggaactcactctgtataccagactggcctcaaactcacagagactgacctgtgtctgcctcccgagtgctgggattaagggcactgcccagctgagggaggtccttttatagtcctcattttccaaaagagaaagagtctcagggaagatcagactgtttgcccaaggccacctagccccggtcccggtcagccttccttcagtgctcacactgcggtccacactgccctctggtggtcactagaaccctctgagtacctcacctccagtctttgtgcctctgttcggttgctttgcatctacttctctctcactttaaggcttatttgttttttattttatgggtatgttttgcttgcatgtgtgcaaatgtaacacatatcttcagtgcccatggaggccagaaaaggccaaggtcagatcctcggagctgaagttagagaaaactgtgaaccaccatgtgagaaccaaacccgggtcttctgcgagagtacccagagctccttaccacgtctctcccccctctcactttaaaagtcatctctagccgggcatggtggcgcacgcctttaatcccagcactcgggaggcagaggcaggcggatttctgagttcgaggccaacctggtctacagagtgagttccaggacagccagagctatacagagaaaccctgtctcgaaaaaaacaaaacaacaacaacaaaaaaaaaaaaaccaaaagtcatctctactcactcgcccatcttgacgctctttcttctgccctgcacgatgttgcatgcgcacctgcagtcaccatttactgctgccctgtctcttcctaccatttaggaccacgccccttcacccgcgttaagacgcccttcagttcatgtcctgaactcacttcctcctctcagtccatgacagaagatctcctttttaaaccaacacacaatcaaaacacagaagcagaagagactctctgccctctgtccatctgtccatcctccctttagcgtacagtcccagaaggtatccatcccaaccgtctctgctttctcaactccatttcccgttcacctgctaccctctgcctctgcaacctcctcattaccaaactcttgaggaggtttccaggctacactgtgatggaacgctgcctgttagcgaatgcttcctctttgggagctcttgtcactcgttgctatgacaacaagcccttctgtgct

SEQ ID NO: 3153 - DNA, 4753 bp, Mus musculus
cagcttgccagcgttggtctggcggcagcaggagtgctgggagctgcgagtaggctcggcgccgctggagcagacgccggttgtgagtcggaagcctggcgctgtcgactttggaggtctcccagtggactttctacagctatgaaacctacactgtggggcaccacgatgcttccgttggccgtatgatgaggaggagaagttggctttggagtgctgggagcctgagaagttgctgagcacccagcgcccccagcccgcccactggcccgcccataacacaatgaacaaactgaccttccataacaacaaagccatgcaggaccgtcgcagagtgtgtattttcctccccaatgacaagtccgtgagcatcatcataaatgttaaaattctgtgtcaccagttgctggtccaggtgtgtgacctgctcaggttaaaggacagtcacctctttggtctcagtgttatacaaaataatgaacatgtatatatggaattgtcacaaaagctttataagtattgtccaaaagaatggaaaaaggaggccagcaaggtacggcaatacgaagtcacttggggcatcgaccagtttgggccccccatgatcatccacttccgggtgcagtactacgtggagaatgggaagctgatcaggtatgagaacaggccacgggccggagcctcggtgccctctgcagcgcttctttcggcagacaccaagcacatcctggtgccagcgctgcctgccttccgccttgaccgaattgcaagatactattattactggcacctacggaaacaggtgctgcactcccagtgtgtgctcagagaggaggcctacttcctgctggcagcctttgcactgcaagctgacctcggcaacttcaaaaggaaactgcaccacggagactactttgagccagaggcttacttcccggcatgggttgtttccaagcgggggaaggactacatcctgaaacacatcccaaacatgcacaaggaccagtttgccctgacggcctccgaggcctacctaaagtacatcaaagaagccgtccgactggacgacgtcgccatccattactacagactgtacaagaatctagaagaagagaaacaattgctctatgatttcccctggacaaatgttgggaagttggtgtttgtgggcaagaagtttgagattttgccagatggccttccctccgccaggaagctggtctactacacagggtgtcccacgcgctcccggcatctcctgcagctcctgagcaacagccaccgcctctacatgaacctgcagcccgtcctgcgccacctccgcaagcaggaggagaatgaagagaaaaagcagtaccgggaatcctacatcagcgacaacctggaccttgacatggacccgctggaaaagcggtcccgagccagtgggagcagcgctggcagcgtgaagcataagcgcctgtcccgccactccacggccagccacagcagctcccacacctccggcatcgaggcagacaccaagccccgggacccagggccggaagacagctgttcaggcagcgccatgcaccggaagctgaagacctgcagctccatgaccagccacggcagctcccacacctctggggttgagagtggaggcaaagaccgcctggaagaggactcgcaagatgaggaaatcgagatgctggtggatgaccccagggacctggagccgatgcctgaagagtcgctggaagtcagcccagagatgtgtatctacatcacggaagatatgctcctgtcgaggaagctgaacggacactcagggttaattgtgaaagaaatcggctcctccacctccagctcttcggaaacggttgtcaggctgcgtggacagagcaccgactcccttccacagacgatatgtcgaaaaccaaagacttccaccgatcgccatagcctgagccttgacgacatcagactgtaccagaaagacttcctgcgcatcgcgggcctgtgtcaggacactgctcagagctacacgtttgggtgtggccatgaactggatgagagcggtctctactgcaacagctgcctggctcagcagtgtgtcaacatacaggacgcattcccagtgaaaagagccagcaagtacttttctctggaccttactcacgacgaagtcccagagttcgtcgtctgagtcgcccctgcgggcagccctgcgggcagccgctgtctgctggaggctgtggagtctgagggtctttacacattatttgtgccataactttttcaccccaaacttagctttttctttatagtattcgagatggaaacaaaagccttgggacagttgcactttaagtattatgcagaggtaaaagaaacagagaatgtaagaggaagacaagtgcccagattgtctattgcccctttggaaggaagtgtgctttccagctttacccagatttcagactgtcagactgcagtgtgtttgttcatctcttgtgttccggttcaaatttatgtttatcacgtgaaagatgttataggcttatctgtttgcttatgggtttttcagccacttcctcatgaggcacggtttgagggggaggacaaaggggagttctctcttcttttctggagagccattcttagtacatagccattgttgcctcacagaggttggtccgaaatgaacactgaagttggtgggagtcttatgttctagccaaagatgtgtatgtgatggaagatggaagccccactcagagtccagaaggcgtgtgccgggacactgggctccttcacaaatggacagtgctctgtccgctgttttgttcttccatgaccttcccaggaagctctgggattggcctgtgcttgtgacatggtacattttgcagtttacaaagctggtgtatgttaacaaccattgggaatgtctcagaagacatttgtttggttgtatttcctttgttggtttttaatggtggccaacagatggtgatgctagtttctgctttaacaagatacccttactgtatgtatatgttatacgtatctagatacgtgggactctgtgtgtttatgtgtttgaagcttagtgactcttcatttggacttcagtatatgtcttgcacacatagaatttcttgtttaatgtcaaggatgcttagacacagacaatcagttgataaatgtagagttaagagtgacttttccatgtgtgcctttggccaagattctcaaccctgattgcataatagacttgtccagagagcttttaaaacatgcccgggtcccaccaggccagtttaaaccagtctcctgtggctgggagattgatttaaagtgtaccaggttgagacagtaatgcacagtaggattggagatccaagagtgtctttctattcattttgaagtaaaagtatacagaaaatattagtgatagagaatgggccacttttaagacagggcctgctactgttacagtgtataatgaagccaggagaatgagtttggtcaacttgatatccattgaagacgttgctcgcccttcaggagagaacttcatagcacaatgtctttctaggagatgtttttaatgatttagtattttacaacatttgtttaccatattttgatactccatttttgctatctgccaggttttattaaaaagaagactatgtattattttctaaagaaactcatatttttgtacaaacttatgtttccaagtaaggaagaaatagatgtagggtcaggcagaacatagcagtgtttccccctggctaggtcagtgtcccagagcccgtggtggccacagacatgcccggtcaccatgctgccctcctgtgctggcacggcctcagcagggtcacatccagtaactctcacctgacactaaagaaggaaaaagaagttctgtgctcatgactttattttgcttttgttgaatgcttttagaagaaccaaagtttcagatgccagaatgtataagtgtctcagtgtccacagataggcaaagggcaaaggggtccgtcacctgatggcttcttttgcttccgagtcattgcatagtctcatcattgctcacagatgcttaggggccacaccctggtgaagtacgcgatctccagagcacagatggccgtgtattcccacagccctcggcatctcttgcagatgcagagatggaaaggttgcttgcttggctgtgtgctttataccttttttctctctgctccagaatccagtcttcagggttctgcccaggctgtcgatcgccatttgccctcttccaggcagacttggaaatagtcttaaagggttttcaaagacaagatcagccaggaaacagtttctcatttctgacccacgggagaatcatagacatatatgtatgtggagctccactttgaagaattgacattcttgtattgggcagtcgttttccaaagtaaaaggaggaaagtataaagccgtcactcacgctgcacttgctagcgtgtccatggctggcagacgcaccagtgcatctgtcacctccctgcgtcacctgcatctgtatttgcaacggtgagctttgtatctaagtaagctgtaaacagtcctttctgtgaaaggatcatcgtgtcgggatgatactgaaagtatgtttaaaaaaaaaaaaaaaagctacggcgttattttgtaattatttcttagaggtgtttcatggtatgcgcgaccatcaataaagttaacttttttgccttta

SEQ ID NO: 3154 - protein, 678 aa, Mus musculus
NLHCGAPRCFRWPYDEEEKLALECWEPEKLLSTQRPQPAHWPAHNTMNKLTFHNNKAMQDRRRVCIFLPNDKSVSIIINVKILCHQLLVQVCDLLRLKDSHLFGLSVIQNNEHVYMELSQKLYKYCPKEWKKEASKVRQYEVTWGIDQFGPPMIIHFRVQYYVENGKLIRYENRPRAGASVPSAALLSADTKHILVPALPAFRLDRIARYYYYWHLRKQVLHSQCVLREEAYFLLAAFALQADLGNFKRKLHHGDYFEPEAYFPAWVVSKRGKDYILKHIPNMHKDQFALTASEAYLKYIKEAVRLDDVAIHYYRLYKNLEEEKQLLYDFPWTNVGKLVFVGKKFEILPDGLPSARKLVYYTGCPTRSRHLLQLLSNSHRLYMNLQPVLRHLRKQEENEEKKQYRESYISDNLDLDMDPLEKRSRASGSSAGSVKHKRLSRHSTASHSSSHTSGIEADTKPRDPGPEDSCSGSAMHRKLKTCSSMTSHGSSHTSGVESGGKDRLEEDSQDEEIEMLVDDPRDLEPMPEESLEVSPEMCIYITEDMLLSRKLNGHSGLIVKEIGSSTSSSSETVVRLRGQSTDSLPQTICRKPKTSTDRHSLSLDDIRLYQKDFLRIAGLCQDTAQSYTFGCGHELDESGCNSCLAQQCVNIQDAFPVKRASKYFSLDLTHDEVPEFVV

SEQ ID NO: 3155 - DNA, 96469 bp, Homo sapiens
gtgacaaaatatggctttgaaggttcccttgtctcacgattatctcccaccttacagatgccaaaatttattaataaggccacgtaccttttgtttcacaatcatagacttaaaggcttaaactgtaggtactagtttgaggtgattttggtgggatttcagtgaaagtacaactagtcagtcattaatggcaaagggttggttttcagaacctttctgagtctgctcagaagggaacatagtgagagagagagagggttttcaacatctgaagtgggctactttttagaaaaaggaggccagaggccgggcatggtggctcacgcttgtaatcccagcactttgggaggccaaggtgggggcatcacctgaggtcaggagtttgagaccagcctggccaacaatgtgaaaccctgtctctactaataatagaaaaattagccaggtgtggcagagcacacctgtaatgccagctacttgggagactgaggcagaattgcttgaacccggaggtggaggttgcagtgagccgagatcacgccattgccctccatcctgggcgacaagagagaaactccatctcctaagtaaataaataaataaataatacaaaggaggctagagactaagaacaaacttccaaagcttgattactttacctggaattatttgtccctctgtcaaacatgttcctggtgcctcatcaggtgtggtgctagatgtagtatgaaatatacagtcacttcagcatttctgtaggaggaagatggcctagggcatggtgagatgttaaatattttagaggaataatttgaatgtaaagctccaggactagagattaggttttgtttacctgtgtccctaagacctagtatacaatacttaataagtatctgctaaatgaatcaacaaatcaatgatggagaaagccctaaaagagccaggggagcaggggatacagagctttggtaggaggagattaactgagaagagtcaggagagaatggcctaggagaaagatacggaaaaatctgtaggtggaaaggactgaagctctagggagaaaatgcctgaccaagtctgtaccagaagcaaggcagtttagggacaaagggcatgagcttagagtcagatttcctaggttcagatccaagcatcactacttattttctttaagaacttgggcatctgtaaaccagggataatatcttcttcaaagggctgttgtgaagattcaacaaggtaatacatataaacgtcacagatcagtgaccagcaagagtaaggctcggttgaccattgagagtggcaggatttcagagtgggatgaggaacctgtggagagtcataaacatgtgaacagtcactgtgtgatgaaaaggaaagacagccaggcagggatgaataaaaagttgacccaacagctatgagtgtttcactcaccaaactgttgtcttggtgatgtgactaatcaactcatttattcaattttctttaggcttcttcaatgtctttaaagcaaaatgtaagaaaacggatgattgagttgacctgaattttgggattgttaagaaagctggattagaaggtcaaagggattgggacacgagaccactcagcgattaaactgaaaaggaaagaagtcaagccaaaaaacggctaataaactgaaagaacagggaggggtttggggactgaaagtctagggggagatggtgacagtggcagatgtggtggacagagtagtttccagtccaaaggttcagagatggagcagctccaggaaacacaaggtgcagttaaaccttggatggaggtggcggaggctgagcaaatggaggcaaggccacacatttttccttgttcaactcaaactattctgttcccaagcgtatctcatcaaaatgttttgtgagcaaagaattcaacaataaccactctagtaaaatcctgctaataaacttcttaatatcttgaaaagctggaggatgtatagttaagtatagtttcactttagttgaatgatttcttattaagaaattaataattacagttttagttattcaatcaacatcacagaacatcaaaaataggtaatccttcccaaatttgaattagatccactgatatcaatgcagggggaaggctaaaaatagaaataaaatatacaataaggaacatcaatagaatattaattataccatacattgacacttgaaaaaaataaacattacgtgaactgagtgatataaggtgtcccattcaaatcaaccaaggcttcttaagggatagatcatttttcatcaatacctgagatatccggcccagaagcttctcaaaaaatgttaatccttttctgttctcatctcagtgcatctcagatttctctgcctcacccttcacacacacacacacacacacacacacacacacactcactcactctctctctctctctctccctccctgatctctacgtgtaatttatgggattcattcattcaacaaatatgtgtcagatactgttctagatgaatggggccatagcagttagagagattttagatctgtgctcacgtgaagcttaaattctaaaaggagagacagttaacatattcataaatcagatagtaaaatgtgctataaaaataagtgatgtgttaatatttcacaatgatttgtatattaagtctgtattgtacataaaactatcatatattaatgtgtctcctcattatcctttaaattggggtataagtgtgacaaaatgatccaatatggactatttgcagaacagaaaatcactaaaaatgctgattctgtttttctgctcaagaaatcacatggaatgtatggcttaattatataggaataacaaatatataaaaatgtttttacaagagagcgtatttcctcgcccccagtcttcctcttgaagctaaatctagttaagagtgctattggccagtactttcttttctccatacatgtcaaaagtaaacatctgaatctggggtcctttgagaccaatcttccaatccataatttctaattcaatctccatgatctaattagcagtgttctttccttgaagaactgaagtataagaagtctgtttaggctaatagaataatttattaggctacctttgaaaatgaaaaatctaaccactaccttgcctgtagaaaactttcttaatattttctggcatttggtttcatagccaagccaaatcaaaatgaatgcagattttgtttctaacctagaatcaggtgagaggagaaacagcgatcttatgtcgggtgtttcaaggtactgtcttcctttcatccaaccagttagtatagctagcacatcagcatcttgttttataaccaaatcccaaccaccatggacaggtagggtgtcccttggaggctgcaccaagtcctttagcctcagtgaacttcccatgaaattccagagctaggagagcctttttttcttcttcttcttgagacagtgtcttactctgtcactcagattgagtgcagtggcatgatcacagctcactccagccttgacctcccgggctcaagtgaacctccacctcaagtgaacctcctgaggagtagctgggaccatagctgcaagccactccgcccagctaattttttatttttttattttttatttttatagagatagggtttcactatgttatccaggctggtctcgaactcctgggctcaagcgatccacctgccttggcctcccaaagtgctgagattacaggcaggagccaccacatttggcttaggatatcttatttgtacttttactcatgattctttcttaagcaatcaaaaacaagttcaaaggcacatttgttatgcttataacctacccagggtaactaaattaaaacagaatggacaggtttcataaatgctctttgccagtggaacttttgttggtattctcaagaaagccagcattggccaggctgtacatgcgtattctgaaagacagatgttcacccctcccactgttccagttcagtatgtcttaggcacacattgatatcacaaaacactgaagagaggccgggtgcggtggctcaagcctgtaatcccagcactttgggaggcccaggcaggtggatcatgaggtcaggagatcgacacaatcctggctaacacagcgaaaccccgtctctactaaaaatacagaaaatttgctgggggtggtggcacgcgcctgtagtctcggctactcgggaggctgaggcaggagaaacgcttgaacccaggaggcagaggttgcaatgagccgagatcgcgccactgcactccagcctgggcgacacagcgagactccatatccaaaaaaaaaaaaaaaaaaaaaaaacccactgaagagaacctcagtggcccaagacctccataatgttatcactagtgtttcaaaggaatcctctgagaatattatctcagataatcagagcgtgcctgagacataagtcaaagagtaaccagtctgtcaccagatagattgctgcttcctttcttcttgcgtatcctaatgggagtggagggaattgcctcccaactctggggtaagcttttttttcccccaggttttcagtgagtgatcaaagaatcagagctgcaaaactactctggaacctttaagacccattgtatatcacacaaacagaatacatgagttaagtttcatactgtagggaatccaccctttgtcctgcccttctgcttgacatttttctgtactagagctcttctatcttcagtcttctgtataaggtaaagtctcatgcataaggcagcaatcccatgtttatacataattcctcaactatattttagttagtagcagtatcccttaacctagcactgccttgccgctatgcctttcaactccaagacgccagtgtaattctctacgatgggccctctctctacattgtgcaacaccttcccaagagcaaggggcagggtctggcccttccagccttatcaaacctttcttattacatctggagtattctagtattcaagccctcaaggaatgggaattgtgatgtttgtggtgaaattaaagccataatagaatggaaacaaagtagttctttaaatacatcccctgtaaaccatattaaaatgaaactttgaccctggataatcaagttattctacttttacatatttttttttcaaaatttgatgatcaggagaatagaatttaatgaatttaattttttcaactctgtatttctataaattgggtaaaagtaaatcttcttgagttagattgctacataagccccgtgctatgctgcctctgaaaaataattatgcgtattcctggttaggggctcccggtgtatggtaattagacagctgggttaaatgaatgataatcaattttcctgacttttcttaagcattaaagtctctttgggtactttattttactagctgagaataataaaaagagcattttaaatgttaggcagtgaaaatcaggaccataacactaaactatttaagtttccatgtgagattattttctttcattagctacagggacatctaaaaccttaaagtaggacttaattaaatttattttgtttgtttaaagtactttttgttttgcttttaaaatgaatctcagtaattaccaaaaagaaaaatgaacttaatttctttattatgaccttcagccagaatgatgaacggtatttaattctggaaaagtattctttaaaagccagtatgttaaatcactgacttctctcttagactagaacttacatatcagcattaaaacatactctgaatgctggatagccctgatttattattattattaattaattaatttattgagatggagttttgctcttgttgcctaggctggagtgcaatggcgcgatcttagttcactgcaacctccgcctcccaggttcaagcgattttcctgcctcagcctcctgagtagctgggattaccggcatgtgccaccatgcctggctaactttgtatttttagtagagatggggtttctccatgttggtcaggctggtctcgaactcctgacctcaggtgatttgcccacctccgtctcccaaagtgctgggattacaggcatgagccaccgcgcccagccaataagcctgaattatacaaaagataaaaataattttttttcttctaatatgctaatcttaattgtcaacatactatcctggtgtctagaaaatacctgtaaaggaatgtgaattacagcagttcttatctcattttctatattactgtgttctttacaccaaaatgtacaaataccacctaccaaagtttacacctctcaaaataaggctatggccatcatgctttaaaagcatggctctgtgtgcttgttcactctgtgtcctctgccatatgcctacacttaaaataacctggggatatttaaaacattccaaagcccaagccataccacagaccaattaaattatatgcctgagacacaggcatcaatagtttttgaaagtttctaggtaattccaacgtgcttgcaagtttgagagcactgtctcaaccaacttgttctcaggcaaacttctgtttatccttcccttctcagttcacaggggatgtttgatgctctccctccctaggccttctcactattcttcctgcgtatctctaccatagcatgaactaactatgttgtaactgttaactcacgtgtctgttcccctaatctactataagattaaggagtatttttatttttgaatctctgaatctaaccctttgcctggtgcatgggagaacccaataaattcatagaatgaataacctgttcctaagaaaaacaaaagcaaaaatgtagagttgtgttaatatttaaatgccatggaaaaagtaattgcttaggatgtgtttaaaataatgtttccctggtgggcaatgtcccatatttagaaaaacatctcatcatattagtgaaaataaaacatcccaacattaagaagaaacataaaatataactttgaattattacccacacagttgcattctttattgtaataagcacagaaaaacgttttaaacgttttctgtgataagaaatatctaaaacaacacatcctttctcagctccccttccatctttactagattatgtattacttccccaatcagtcctttcagaatttgatgatgttacaggagtttatataactgattttaagagtttaaaatacttagtttgcaaaatattttaactaagagtctctgtttaatgtggtatttatactgttaatattatcactatgattcagaaaatattcacatagtgaattttcctacaatataattctggacaataagcccactcttaaacacacttttttttttaaactgttccaaatattttgctatttgttttacctaattatatttgcagcaatgtttcacgcctaccaatatgttgttgtttatctgttagattttgattcatgaaacctgaaaataaatcagatttaggaactgttttccaagatagtgatatattattcatttatctaatttatctttacacatgaaatgccggattatctcagtaggtaccaaattaatttaagaccttaccaagtagtatacaatatgcactcattctgatgcatataaaagacaaaaatgagaaaaaaagtgcaatcctctacctttaaatgcctacactgtcctcaactattgttatccaatttttaactttagtacattaagtacagctacatttttttttttctttttcagacagggtctcactctgtcacccaggctagagtcccgtggtgtaatcataattcactgtggcctcaacctcctaggcccaagccatcctcccacctcagcctcctgagtagctggggctacaggcatgggccaccatgcccggaaaatttatttattttttatttttagtagaaacaaggtctggctatgatgcccaggctgtcttgaactcccggcctcaaacgatcctgtcacctcggcctcccaaagtgctggagtaccgctaatttaaaaggcagtcattgaaacatatttcttgttctcttttgcatcatggagttatgactttaaatcataagtacagtatccttagaaactgcccagttttatcagaaataagttctgaatgtattgtcaattgtgaaaagacaaaagatcacagttcctaatattcagttctaatggcatggttccccaaaatgtaaaagctgtgactgagacaattatttcaagagagcttcagctgtaaataaacacaaaactgaattcctttgccatgcaaacaagaggcacactttcaaccagtaacagctggcttcatatattcatctttggatgaaaagagcagggcagtttttttttttttttttttttgagacggagtctcgctctgtcgcccaggctggagtgcagtggcgggatctcggctcactgcaagctccgcctcccgggttcacgccattctcctgcctcagcctcccaagtagctgggactacaggcgcccgccactacgcccggctaattttttgtatttttagtagagacggggtttcaccgttttagccgggatggtctcgatctcctgacctcgtgatccgcccgcctcggcctcccaaagtgctgggattacaggcgtgagccaccgcggagcagggcagttttaaagttgacttctgagagcatcagattttggatagtgtcctttctcaggtcctgtttccttgtctcctcatcccattttaaaagccagacacataaaccccggcactcctttagcgaagggctcagtgagggcgtttttgccacccgtggccaggggtcattgggtcagcaaagtcagaggaaacctagaaaggcagaagcccaggaggttgacgccctgcgggtctaggggccaggtgctgggtgtctctcctttcgtgtgcggttcccagcagcaggtcctggtgggcgcagactgaccggagaggtgtggctcgccccctccccagaccccgaggtggcaatgaaacctccatctcctggcttgattccttgtgctataaaaaatcttccactggccctttgcatctctcgccctccatcccccaaagccactatcgggaggggacaaaaataatttctgaggggccatgggcactaaaaccacagcagacagaggctgtgtctacctgaggaactggagaggtagaattagagggggaggctgggcatcctcggcggcgccccctccatccagcgtgaaacccacgaggcgcggcgtctcgagtggcgggcgggcagggggctgcaggattcacgaagccacctccgccggggaccgccttctctcggagtggcctcccctccggcgttccgctttagtaagacgacactcaggccaaacagccgcccccggccagcccgactcggctctggagggagcgccccgagggagtccagccggaggcggagaaggccactcggccagaaggtggggagccgccggcgtcccctcgcacctccgtctccacagcagggggaaaggccctgatcgccgtggtccacaccaccgcgtccacctgaggctcgcctcgcttcctgggtccctagaggggtggcgtactccgctttctcctgcccccaagtggccgcacccctccgcgggacgcttggttgggtccagggcggggcgggcgggcgctccccgtactgccgcgagctcagcgcgcagctcccgcggctcggctgccgccgcggccagttggggcgggtcgggggcggggtctcagggggcggggattcgggggggcgggtcgggtcgggaggcgtgggtggggggcggggcggacgcggagcgcccctctggctggcggggccaaggggctgagaggagtggggcaggctcggcgccggtaggaagagtcagaggggtgaccagagagcccaacgcctggtgctcaagactttctccgaggtatgaacaagaaccaggcgtctgggccctttccgctcgccccatcgctcagccgccgcgccccggacgcccgctgtgccccctgccggcggggcggcggcgggactgggtttcgggagggtttctggaagtcgcgagtcccagcgaaggcagtgcaccgctctccgcctctttcttcgccttcttctcgctcccttagctctgggtgtcgggcaccggtggtaaggtcgcttctccgtgagtcggaggtcgctcactctgggacgggcggacgaggccctagggcagccgagcccggcagcgggggaggcgtggagctcggggcggcttcagcggcgggggcgggaggctggtcctggctgcagactgcgcgcctgggctccgtgcgcggtgcctggttctctgcatcgcggaggtccccggatcacagggctccctggcgggccccggcacccaggtctgtgtcgctgtggctgggcgccgggactagcacccgagtcccgcgctcccgggggctgcgccgtgccgcctgttgtgcgcgcgcagaggcgggacagcccggctgcgggaagggacccgagcgcagggtctgccccgcgtcccggaaagtgcctagtctgcggagccggaggttgagctggggcagatcggcgccagacgggggcctgggtgagatacgagttgggggtgcggcctgcagaatttgggtttctggaggagcttacggcgcgctggcggagccccaggcgaacaggagcaccggattcggctccgggagggccaggcactgtcaggtatggacagctgcggtccacccgtgtaagtgtaaagtctacagagattaaaacaacacctcgagtcctgggacagcataacctaatggtgcgggcgttttcttaaaggcacgaatagatgggaaaatgtcaaaataagcatattttaaagttgaaagctggcagattttcaggccgtgtagttgtgtagctagtgtccaaagaaatattagctcgttttcccccttaacaccttttcatttttatttttttacgcaaaatctgttttgccagtatttccctcaggagctgtgcattgctcacagcagggaaggaaaacttcagcaagcgttctcaggttgcttctgacttccagcctgtgctctccagcatttctgaatgtggagaaaaagtatctcttgctggattttccgagtatgattcccttctgttcttctctgggaccgggcaatgtttgtttatgggttttataagcatctatttaaatttagtttttgcacgaaatactccctcttgccacagggtgtagtttggggtttagaaaatgctgttggagaaagctgctagtggcttcattttccaagaatgtaagtcatttcctttctgtgatttcagggagttgatatttcacagcatcaaaactttgtggggaaaattttccgtaatacatctgtcattaaaaaggcttgtgacttttgggtttccttcttagagcagtgcatgaatttaggttcagcagtgttaaaggatgagaagtttttttttagaatttagagcattatgagactattgtagaaattttaactaccaggacctacaggatggagagtgggggaggggagaagaccagaagagaggcaggaaaacagatgcctttgctgatgtcctttgtagtataaaacttaacagcaccacagcacctaatcattttctcaggtgtggctttgagaaataaacgttttatgttaaaaatgaaaatacttcacaatatgagacagctggcatttgaatacttttcccagtatgtttgtaaacattttggattcatatttcatattaaaatggacatttagtaggattattagatgaaaagggtcccccaggggatatctaatatcaaattatctgcaggacatcttctccagaaagcagactgactgtaatatgaactaattttcccccctttgagttgcttgcaagaatctctgagatctgacactgatgggctacagtaatcagcagttcttgcagtactcaagacattttaaggggcaggaaatctttcctatttccagtatctcctttttgggggcaacaagggtaagctgctagttttaagtacataatttgaacttagagatttaagatgctcctggctgtacaggaaaacgcctgaaaacagcatgggcctggatgaagacgctgcttttgaaagcaaaatgccagtgtgctaggtagcggtttttagttacaaattcttaaaaaaaattgttactgaactaggttagctgaattggggggggggtctttttgtagtttttggattttgtttccacatttaactatacttataaagcttttggctttctgaacttatgatgtaatagactgcgtagccttttgtggcagatgcttggaatgaaagtttcaaacataattgtttttgactgagctgtcaggttcagagttgagtgtaaatgagtcctgtctcacaactaacttttttgataaaggaattctttgtagttttcgatttggatgttgcacattttgatttctaaagttgtgggtttttttttttttaagaaaaataaaacctgcaaacaattattttattacatgaaagccagtaccaagaaaagattaattcagtccagatgtaaaaatgtatgtgaattttagatttggatgatctcaacaagttttcccttttgtggatgggactgcctggatcccagatggcattcacaaattatcccttaggtagttttctgagttgagaatgagatttcttgggctttccctaaaatcattttaatattaagtcttctaaaggatagaaagttttttgcatttgtacatttttgcatttttctgttcattaatacaaacctcataaatgccctagtttggtagatgaagcatatttctttcataagtgggaaaacaggaggtattcagtttgtgtatccttatgggtaaagcatagaaattttggctctcatttttgcaatttcaactttcttcttttaaagtaaaaaaaaaaaaaaaagttttaagtgtgtttacaatcctcaatagaatcctactgtaacacagtttgtggattcaggtatagcaattggtccttgtttgatgatcccctacctcctccccacccccaacgaggaaaaacaaacacagtttattaaaaagtcagtatgtttttaaacgtgtactcccagtactagagttataaaggctgtttgttgcacacattaaaattatgtatttttagaaagtctttgtatgattatatcattacacattttgggagtgtgtttatgtcgtgattgtgtataaaacaatggagagttaggagaggggaatgggaaagatttagtgaaggagttttatgagtagtgaaatttcagttataatgtatgttccccaaaacccaaacaggaaaaatgttatcgttggtctctgtggttaaacttttatacagagggtagttgagagggctttctgaattgcacattatcctgaggaagaggctttgggggcctttaaaagtaagtagaaacaagttaaagggataatttgagaggaacgaggaagtggaatactggacattgaattgcaaggaaaaagttagaaggataagtatttaaaacaaggctgaagtagagagaacttactgtttagaagtgtagattaaagaataaggtatttttagctgagaaaaaaggatcagaatgattagaatcaaggtgccctataagatctgtatacaaacttgaaataggactgctaattgatagttatcctggaaattttgcctgtctttgtgttgaatcactagtttggtgttaaataatgtgcagggactggatgcttataactgtatcccgtacactccaaaagccacttcccatttcaaagactggaaacattttttgtttaagtgctaatgattctacaaatatttaattagtcccccaacatttgaggaaactactaatgtctacttcccatgctgtgggaccagagggggctctacagcagtaatggctgaagttattatgaagttttaggtagaaacaagcaatctgtgcttctcattactttatgcgatttagtgatgtaattacttctgatgcaagtttgtgtatgatcactttttgtatatatcaaatggaacagagcagtcatgcagtatatataccatattgatcaaagatgaattacagaacactgagaaggggaaagaaatcattgatctctcagctgattgtattgcttcaagtcaagaagagaaaaatgtgctgaaacaaattcacagatgaaccaaatacagtcccaaggagaaggcagtgttttcctggagcttccttggagtggtctgtagcatagcattttcttttcttttttttttttttgaggcggagtctcgccctgtcgcccaggctggagtgcaatggcctgatctcagctcactgcagcctccacctcccgggtccaaatgattctcctgcctcagcctcccgagtagctgggattataggtgcctgccaccacgcccatctaatttttgtatttttagtacagatgaggtttcaccatgttggccaggctgatctcaaactcctgaccttgtgatctgcccgcctcggcctcccaaagtgctgagatcacaggcttgagccaccgcgcccggctagcatggcattttcttgaatgtctttccccagctgtatggtcttgtcttagcagagttaaattgatatatcaagaaactaggtagagatttggtcattatccaggtcattgcattaatgtgctgataattgggataattctgaccaaaaatatctatttagactctcagtattccaaatggatcctcttgggggtgttttcagatgttttccaacaacattatctttgtacatgttttatacaactttgagcaataatgttttactgatacatgaagacagagggaaaaacaatattttgaattaatttatagccacagtttcatgtgagggaggaaatcatttaaaaaaattaagcaatttcttgatgcatattttaggaaatataatgaagtttctcacttagcttttcagatgatttttctctctgattgggttaaataaaatgtaattaattttctccccacaggtagtagcacttgtgtgtacagtttcagtagatgacttttttttttggtccctgtagctttatttctttgaacttgttactgaattatacacaaccagacaaatgcacagatcaggagtgtacagcacaaaatgatcacatttgggcaactagcatccaaatcaagaagcagaacattaccagcctctctttacagtcatcatctttgcccccaggataaccattatgctgacttttattgtcatggttagttttaaactgtttttggactgcatttaaatgcaataaaatacacattttttggtcatctttagctcagcataatgtcatgtgatatatccaaattgatgtaggtcgcaataggtcttttttctgttatttctgtgaatgaatatgcccagtttctttatccattttgttggtggatatttgggtagtttgaggacagtacatggtaggtgaccttttgatggctctaaaaaatgttgagcactttggggttgaaagcagagtatggtcttaagattaaaagagaaaaagtaacgttagaggtaagatgtgagaggaaaaaaagcaatcttaagaaaactttaaaggttccactcagccactgtatcctaaggatatagtttggaatataccaactagatatcaccagatttcaattgagaattggtaagaggaaggaggccttaggtgacatctagccagccccatcatttttcagagatggaggcagaggttgaatgattcatacagagtctcacagctgatgacagcgccagtagtagaagctgctctgactctcaatcttgtctcctctagtgccacatgcttgttggagagagagaaggcaagatcagggctaccaactgtagctgtgcaggttttgccatgcaaggtgggtctgaaaaccagctccctactatgtagtccaagcaagtgagtccattggggggctcactgcctggaggatgggtgcccttttctgattaatgcaaaggtattctatggctctgttcagatagactcagatctgcccagaggaaatggatctgtagcccaatgaggcagaatttttcttctttcagcctgctgtacctctgccctccatacagagctctgttggggcttgccttttcccttttctctctctctctctcacttctagggcttcctaatgagactttgggttgtaagtatcaagtaggagatctcttgaggtccctcttgattcactcttgttgatccataaatgatctaggatggaccctaatttcaaaggactgctttgtcaatatttttggaataattcatccttaagaaaatgtttcaaaaattcagtttttggacttctcctgcctttatgcttctccctcttttctccctttttgtgtcttccttccacccccatccagttatcgtttcttaaagatccctggaaacatccaatctttgtctactgagagcagcagtgaaattctgacgctaaaatctgtggcagtctccaggaagtacttattgtaaaacataagattatgatttcactgagagatctaacagataaaacaaagtgcttgcaaaggaaaactattcatgtatacattttcttttatgtttccctaaagaataaaggacagttttattacttaagaaaagactcagagcttcagcttaagctcattaaaaaggtgaagagaagttaaaattagagaattttataaatatgtggtatttatatatcctacccgaataagatactgcttatcacagcaaaaatttagcatatgtaatgttaacaagtaaaaaatatgctgaccatagggccacagctctgacaagttgctcatgaaattactacagaatagcgtaatccgtattgaagacagcatagaagagggatagtaaaatataatgataggaatgaggtcttcgagatcagttccctggggcccaaatccagactccagtattctcccatgtgtaaccttggggaagttacttaactctctacacctctttttcctcatcagtaaagtgggagatagttataatagctatcccacaggattgttcttatttttaagtgaaatggtacgtgtaaaacaaatggcatggtctttgatatataataaacgtcttacgtgatgttagctattgctgcttaagacaaaaagaagtgatgtataaaaggacttatagttttattggaggttcccaagccttcatttataagcatttcatgagatttaactttgttttttgatggcattaagcaggcaacaaaacctagtatttctcagttacagatactggcaagtctgtgttgctgcagtaggagcagctggcctgttgcactgattactaattgatcgagttatttttcttaattctcttctaatttccagccgtctcagtccttcagcttctgtctgctagataactgtttctttccatatgtcaaaaaagccagcctgcagatttttaaaattctccttacggtgactgatgttgtgcaaagttcttttaaagagtaccactgactggcccatgtcttttgctcatgttccctgtatggcttcatgtgagtacttctgaagaaagccactattattgatataaagcagttctttattcccaacccctaaccattggcacagtttatataatgtgggtcagaaccatttgtgattttctgttatgagggccagagtttgagattttaaaccattcattcaaagaaacttaagaaagacacagttaaacaccttagaaagatacattttcatctaactagcctaattacgagctcagctaaaaaaggtacaggatcctctagaagaatcgtgctgtatcattctgatctgtttgttaaagggcgggggacctagtccagataacccagttccccgttttgattgtgtgtgtaaaatcttgagcttagtaaacttagcactttaaaaatgttcactaagtccatcaaaagccaggttttatgtctttatgaagtattcaggactgtgctgaatactttgtgcaatttctgtcaatgtgtttcatgtctagttgggggaacaaaatacatgtgtttgaaaagatattagatgtttccagatgagtgtgaagttgagctttcgttttagggtccaaaatcaaggatggtcacataggatgttcccagccttcctggggccactggatttatactggttagtgaagtcaggctaagatttttctatccttcaagcccatagaaaaggggcttttctagtagcaacagaatgtgcaagatctggtaaaaatctcaaatattaaaagacaactatgaaattaaaattattaaatgtttaaattcatgcattcaatataatgtatgcctaggatatgccaggcactggtctaggtctgagagatgtcagtgaataaaataaaggaaaaaaaaaaaaaaaaaattctgccttcgtggaccttatattctattaggaggcaatcagcataagaaaataagtgttgtagtattttggaaggtaataagcctgatgggaaaaagaaaaagtagagcaggctaagggacagtaggagtgctgggggagggaggcagggactttgcgatttggtggagtatagtcaaggtaggcctcactgagaagagggcttgaaggaggaagagagccacacagagctagctgggggaaaagtgttgcagcagagggactagtgaaggcatcaggcggaagcatgcctgatgtgttccaggagcagggagaaggccacagtggtggagcactgagagcagggagagaaggagtagtagataaggttagagatgtttggagagcacatgtttggcttgtgtggactgtattcaggacttgactgtgagtggaatggggagccaggttttgtgcagaggagtgagaggatttgatttgcattttaatagaatcactggttgctgtaggaatctggaatttagggaagaggtctaagttggagatacaaatttggaagttgccaacagaatttgggtgagatcacttggggaatatgtgtagtcagagaaacaggcttatggaccaagccttggggcatatcagtatttacagtttgtagagagaagaagaaatcacacacataatccaagaagtgttttaagccaaagtaattatgcacgtttttccaacatagtgaacccaattaagtgtctccattccttgagtaacaatgttatcactagaagatattgtgaactctattgatctacacaatggaagaatgaactatgagttgtttttctaattgcgttgatggtcttgggctaaacctggatgcttcatcttttagaggttgtgttgataaggaggaatcagtaaaagaaaattaaaaaggagcaagcagaggataggaagaaaattagaaaaatgtccttgtagtcaaagaaaatatctccagcagaagagtggatcagttagctcacatgttgctgagaagtcaagcagggtgaagactgagagttgctcattggatttagcaacctggggagtcattggtgatgatgacaagagctgtgtcactggagaagtggagatgaaaaccttattggagtgggttcaaagagaataaaaaatttatgaaagataactattacttgtaattcagttttgtatattacaaatattcaatattgatgtgggtacattttaatatgcctggtaggatgtgcagtgggactttggaaatgggaatgttggaggccgtgcatatcttcagcaggctttgtcagggttagggagcctttgagcttttccctagttattattggtaggggtagggctctagtatatagattgtagtttgtatattttgaaatagagaaacggttctatgcagttttttagttctttgttaaatgtctttggatgagaactatatcttgaaaatactcatactttgtttaaagactttttcatttctagtaaagatgtgttctttaattcaacctattgatccttgtcttagattgttttttgatactataatggagtaccacacataaggtattctgtccataaagaatggaagtttactattgacattctttacagaactagaaaaaaactatttacaaattcacatgggaccaaaaaaaagagcttgaatagccaaggcaatcctaagcaaaaagaacaaagctggaggcaacatggtaccatcttcaaattattagagcaacagtgaccaaaacagcatgatactggtacaaaaacagacacatagagcagtggaacagaatagagagcccagaaataaggccacacacctgcagctgtctgatttgtgacaaacctgacaaaacaagcaatggggaaagaattccctatgcattgaatggtgctgggataattggctagccatatacacaagattgaaattggactgcctccttataccatatacaaaaattaactcaaaatggattaaaagcttaaatgtaaagccccaaactaaaaaccctggaagacaacctaggcaataccgttctggacataaaaatggcaaacatttactgatgaagacagcaaaagcaattgcaacaaaggcaaaaatggacaaatgggatctaattaaagtaaacagcaaaggaaactgtcaacagagtgaacagacaacctacagaatggaagaaaatatttgcaaagtatgtactgacaaaggtctaatatgcagcatctataaggaacttaaatttactagaaaaaaaatccattaaaatgtgggcaaatgacatgaacagacacttgaaaagaagacatggatgcagcaaacaatcatatgaaaaaaaagcttgtcattgatactggagaaagcaaatcaaaaccacagcgagataccatctcacaccagtcagaatggctattaaaatgttaaaaaaataacagatgctggcaaggttgtggaggaaaaggaatgcttatacactgtttgtgggagtgtaaattagttcaaccattgtggaagacagtgtggtgattcctcaaagacctaaaaacagaaatacagttagactcagcaatccctactgggtatatacccaaaggaatataaatcattctattacaaagacacatgcatgcatatgttcattgctacactattcacaatagcaaagacatagaatcaagctaaatgcctatcagtggtagactggataaagaaaatgtggtacatatatatcatggaatactatgttgccataaaaaagaatgcgatcatgtcctttgcggtaacatggatggagctggaggccattaatcctcagcaaactaatgcagaaacagaaatactgcatgttctcacttatgtgggagcttaatgatgaggacacatggacacatagaggggacatacactggggcttaccagaggatggaggttgggaggagggagaggatcaggaaaaataattaatggcttaatacctgggtgacaaaataatctgtacagcaaacccccatgacacaagtttatctatataacaaacctgtactcatacccttgaatttaaaataaaagttaaattttaaaaaaaggaagttcatttagcttatggtttgggggccctgaagtccaagagcacggcaccagcatctggcccaggtcatcccatggtggaatgcggaagcaagggcaagacagaaagcacaaggggctggactagtttttataacaacctgctcttgtgataactacgttaatccactcataaggacttgacccttatgactcagtcacctcttgttaggccccatctcccaatgctattgcatcggggattaagtttccaacacatgaacttttgggggacacattcaaaccatagcagtcctttttcatgaaaggtgagacatgtgctttgaggtggcttctttttcagcaatggtgataggtttgatctgactaggccacacagcatagtgccccactggcctggaagccatcattcacagagtagatggctcaggttagtgaatcccaagagccagagcaaattgagtaatagaaaaattgcctcgttaaaattttaaataccttgttgatgactttcatcatgaagtgttatttcaaagcatgtgattaagcaattttcatagttctgtattttataattatacaccaagaattttctcttctgggaactacctttgaattttgctaactgtctgtaatactgtcatcaaaatgaatcaacaggtgtctgatactaattatcttctctttctctaagcttattaaaatgctaacacataggcctttaatgcatacgtattgtttttggatagttagaagctcagagtggttggtagaatgaaaactttgttacatatattttagtgtttggtaataccaaagtatagtattagtctttagaaagttgctaatttagaaaatgccggaaagggcgaagactttcctttgcagtggattagggcacaaggtttttgagaagtggagctctggtgattatatgtgtgtttccagtgggttgtggtatatgcatataatgtcagcattctcttaggtactgctttgccagcactgttttattcgcatcattttgaatgtttttttcagctgaaacttgtaagttactctacagttagttaagttacagtacagttagttagaatgtaattggcttggaacaaatacacgaggccaatgtggaataatttcgcagtgctggggattttacattgtagatactggagtatgcagaggtataaaactgagcaagttttgaaataaatcttatgtcacttgtcagtgactacagaataaagtccagatctcttagggtggaattcatcatgccagcccagagttgcaagcctgtggcccaccaacaagtttggctgcagacatgttttggcttttaacatagttatttgccaacatttaaaaatagagaaattttacattaaaaaaattgcattttataccttctcttgaaaaatttgaaggcctggcaaggtctgttgtagcaacataacagcttccccctttatacggggtgtgtgctctgtagtctcccacagtccctggcagagactctcttgtcctcaacattgggaccaagctgttgtaggcatttttcatcctgcaggcttcacttctttgctcctgcccttgtaggcatgtgagtttgctaaccttgtgtttagatacttatttttttttctcagagttccttaaatctagccaaattgttcttcccattgtcctgtctaatgcgtacacacttcgtctacctcatgtttctgcttctggcttctccttccgctgcgtccgagctgcatgttgctcatgtcacatcattggaacttagcacatttctagctccccagctgtactagtttcttgaagacaaagactatttaatttactaacacctatcaaatttattttagatcttctgggttaactatttgctaatggtttggctgcgtccccacccaaatctcatcttgaatttaactccaagaattcccatgtgttgtggaaggaacttagtgggaggtaattgaatcatggcggtgtgtctttcccgtgctgttctcgtgataatgattaagtctcacaagatctagtggttttaaaaatgggagtttccctgcacaagccctcttctcgtctgccgccatatgagttgtgcctttcaccttctgccatgattgtgaggcctccccagccacgtggaactgtaagtccaataaacctcttccttttgtaaattgctgagtctcaggtatgtctttatcagcagcatgaaaatggactaatactctattgttagatttagcttccagtgggtggtaatctatgattatagtgacacctgtagaagaagtagaacgtaatcaaaatcttatgtgaaatctacttcctcaaatagtgctttcttaatttactatgccatttcctttgtagctttgttagtaacatttatataatccatttgagtatgaattcactaaacacctcatttattgccatttccctagttctgtcacatagatggatgatgcttccagatgaatgcgtcattactatgtgccgttttattattttagatatgcttcttcctaatgactaatattgttttaaatgtcttatctttttattcatttggtaaatagtatgtctgtgatattactgtgataccttcccttttgaagcttttactttttagcaggaaattcagatttaaataatggagtacataatgatttaatttcaaaaagtgttattaagaagtagaggtgctgtgagacttcggggcagtctgatctggtctaggagtggggactgaagtgggaattgcaacaggactgaattctgaattccttaactttctcatatatattccatggcagtttgtaaagtaattggaatgtaaaaatttaaccttacaaacaaaaagataattttgtaacaaaataatagttaaaaagttttttccctgagaacttaacttggctgttgtcattgcgttagtgataaacaaaattatgatttatagctctagaatttattgtttggtacctgagttgaactctgtttaaataagtaaacaaaggacaaatggggaattaggctagaaatttcagatattagcctggcacagtggctcacacctgtattcccaacacctcaggaggctgaggcaagcgctttgctggagccccgaagtttgagaccagcttgggcaacatgatgaaactctgtctctacaaaaaatacaaaagttaattgggtgtggtgatgcgtgcctgtggtcccagcactctggagattgaggcgggaggattgcttgagcctggaaggtcaaggctgcagtgagctgtgatcatgccattgtactccagcctgtccagcctgggtgacagagcaagatcctgtctcaaagaaaaaaaaaatcagatgtgaatagcttacaaaaacaacttttattttatgaaactataattatttcaaaggtatttgtaatgaggaattttctcatggctttcagaaataggatataaaaaataaacttagtaatcccccaacagttactagtggatagcacctttatttaatacttgcaagcccataactgaaaaattaatactttattggtcggaagaatgaagtaatatggtatcctgaaaaaaactcggcagtgaatttactgacatgtgtgacccaaaatatagagtggaattttgtgtggttgcgtatgttttatcgcaacaatcagaaatgttttatgtattttcttccaaagaaaatagaattctatacttaacccatctaaatatagtggtaaagttaattttttgcatagtttagtgacatactgaaacaaaggtcagctgcagtggtgccatttctgaaatctcttttgaggaactcacgttacttacaattatagaaggagattcagaaacattgacatgtttaagggttttacttcaaagaaacccaagattttcaagtgtaatattaaggatatttaaggaaattaaaatcaggaacagtttttaataaatgttatctcatctagaatttaaaataaattctaattaaatcttaaaagtaaaatcttttaaaactcaaatactgattttctgaaccctcattcattttaaatctgtgaaaggatgttgagagctaatggtttgtaattgactaaattatttgcttctacaggtgcctagagaaatgtaaagagaaattttcatgaaatataagttgtagagtaaaacctagcagggaaagctaattgaagttatctaatttataaaacaacatttgctttaattactgccttacatattcttgaactaggctcatgttgctgatgagtaaattttcaggaaatttttaatcagtatattatagatacagggtctaaattaattcacattatcagtcatttgttcagagcagctgttaccctgaaaaatactctattaatttatagaactggttaggaaagggatatgaaagtaaaggtgttttgaaatgattacatattatacatttaagggtaagatactaaggacggttgcttgatttactctttagaacttatttatttattgagacagaatctactcctttacccaggctggagtgcagttgcataatttcggctcactgcaacctccgcctcctgggttcaagtgattctcctgcctcagcttctgagtagctgggattacaggcatgcactaccatgctcggctaatttttgtatttttagtagagacagagttttgtcatgatggccgggctggtcttgaacccctggcctcaagtgatctgcccaccttagcctcccaaagtgctgggattacaggcatgagccaccgtgcccagcccagaactttgtaatcttaaaattagaatgcaggaggctgtgaagctcgaatgaaataatgctggtgtttttgttgttttgagactgagtctccctctgtcacccaggctagagtgcagtgccatagtcttggctctctgcaacctcttgtctcccgggctcaagtgattctcttgcctcagcctcctgagtagctgggactacaggcatgcaccaccacacccggctaatttttgtattttttagcagagacggggtttcaccgtgttggccaggctggtctcgaactcctgacctcaagtgatccacccacttcagcctcccaaagtgctgggattacaggcataagccaccatgcctgcccaaaatcagctttttaaatgatgaatcatatgcaataataaaataaacaaattttaagtagataatttgatgagttttgacaaatgtatatatcatcatgtaaccagcactgcggtcaagatacagaacatttttgtcaagccaaaaagtttcctacagctcctttttagtcagtctcctcccctgccactctagatgcttttgtatctggccatgtttcactttagcatgatgtattcatccattttcttgcacatatcagtagttcctctttgttgttgggtggtattcagttgtcacaatttgtttattcatttacctgttagtggatatttggattgtttctaatttggagctattatgaatgaagttactataagcatttatgtattatataagtcttgggggacatagcttttcatttctgagttgtatagtaagtgaatgtttattaaaaactgtcaaattcattttcaaagtggctgtattatttaacattcccaccagccatgtctgagagttctagttgctccagattctcactaagatttggtattgtcagtgtttttaactttaaccattctggcaggtgtgtagtggtacctgacttcgatttttatttgcattttcctaatgactaataatgttgagtatcatttcaagtgcttatttgctatttgtatatctttggtgaagtgacttttttggccatatttttaagagttgcattgttcttgagttgtaatatttatatatttttggatttaagtctttaatcagatatggtttctatttttccaaatatgttttgaaaatgtattttctgttatgatgatttctttgtcattttttaagtgactttcagagggcaaaattaaaaagcaaaatttttgtggttcatgtttttaatgccctaagaaaaccagggcaacaaagatcttcccctgtaagttttctatgacttttagagttttagcttttcaatttgggcctgtagttcatttcaaagtaatttctgtataagggctgaagtagattagaatccgattctggatttttaccgaaaaaaaaaagtccctgggatttttaaaaactttattttgaggtaatttaattttaatttttttagagacaagtctcactctgttgccaagactagagtgcagtgcatgatcatggctcactgcagccttgacctcctgggctcaagcagtcctctgcctcagcctcccaagtagctgggaccacaggcatgcaccaccacacatagctaattttttatttttaattgtttttgtggagatgggggtctcactatgttgcccaggctggcctcaagtgctcctcccaccttagtctcccagagtgctgagattaaaggcatgagccaccgcacctggcctgaaataattttagactcacaagaagttgcaaaaatagtgtacagagtctcccaatgataatcaactgtagtctgttttcaaaaccaggaaattgacattggtacagtactattaactagccttggatttcttcagtttttatgtgtactcatgtttaacactaattgaactttggttgtagttgcattgaatatatagattagttatgggagaatcaatatcttaacaatattgagtcttcctattaatgtacatttttatatatttagttaggtctttttttttttttctttgagatggagtctcactctgtcacctaggctggagtgcagtggcgcagtcttggctcactgcaacctccacttcctgggttcaagcgattctcctgcctcagtctcctgagtagctgggattgcaggcgcacaccaccactcccggctaattttttgtatttttagtagagatggggtttcgtcatgttggccaggctggtctcgaattcctgacctcaggtgatccacctgcctcggcctcccaaaatggtgggattacaggcgtgggccaccgtgcccggcggtttgtatgttttatcatgaacatatgttaaattttatcagctgtttttctgcatctattgaaatgatcatataatttcagtttttcatctgttgtggtgagtaacattgatttttgaatatcaaaccaatcttgcgttcctggaatacacccaacgtggtcatcatatgttgtccttttggtatatattgctgaattcagtataccaaattttgttaggaatctcgtgtctatgttcatgagggatattggtcatttaaaacattttcttataatgtcacctagtttgggaaatgatggcctcatagaaagagttgggaaatattccccttttttggttttctggaaaagcttgtgtagaattgatattaattttttatttgaacattgatagagtttaccagtgatgccatctgagcctagaattttctttgtcataaaatttttaactaaaaattcaattcatttaataactgaggggtcttcagaaagttcacagaaaatgcatattatgtatggatttcagaatggttttgcaccgaaataaactcatactaacatgttataagatacctgaataggatctagtttgaggcactaaaaagggtaagacagcaggacagcagtttgaaaagaacccctctcaaagcagcatgaattctgctgaaattgaggcaagagtaaacatcaaatttatggtgaagcttgggtggaagaatggtgaaatcactggtgctttagaaaaagtttatggggacagtgccctaaagaaatcagcagttggtggataacttactcgttttaagaagagactagcaaatgttaaagatgaagcctgcaggggcagaccattcacatcaatttgtgaggaaaaaaattcatcttgttcatgccctaatttaagaagaccaacaattaacagcagaaacaatggccaacactgtggaatctcagttaattcagcttacacaatcagaactgaaaaatttaattcgagcaaactttccactagatgggtggcaaaaccattgtgcccaaatcagctacagacaagagcagaacattcattggaaattttaaagaaatgggattaagatcctgaagcatttcttcaaagaattgtaacaagagatgaaacatggctttaccagtatgatcctgaagacaaagcactttcaaagcagtggctaccaagaggtggaagtgatccagtcaaagcaaaggtcagggcaacagttttttgggatattcaaggcattttgcttgctgactgtctggagagccaaagaattgtagcatctgcttattatgagagtcttttgagaaagttagtcaaatctttagcagaaaaatgcccgtgaaagcttctctggagagtttttctccaccacaacaatgctcctgctcaatacctctcttcacacaaggacaattttgggagagttttgatgggaaatcattaggcattcaccctacagtcctgatttggctccttctggtttctttttgtttcctaatcttaaaaatcttcaaagggcacccatttttcttcaattaaaaatgtaaaaagactgcattgacatggttaaattcccaggaccctcagttctttaggatgcactaggtggctggtattattataaaaatatcttgaccttttggagcttatggtgagaaataaagcttatattctttatttttatcttttaattccattttttccatgaactttttgaagtcccttcatatagggctattcaggttatctatttcgtcttgaatgagctttggaagtttgtcttttaacagatttgtccatcttatctatgttttcgaatttattaatgtaaaattattcataatagtcttattattgggtgctggattttgacagcttgggcttcattctagaaggatgaatgaacccattcattgggttcgatttttcatggaggataagtgtagataagttacttgggcattaaagagtttggaccttattctagcatgtaagtaagttacttgggctttaagaagtctggactttattcaccatgtaggtaagttacttgggcccagtttgatccttttgaggcttgcttttaaccttctatagagttggttcagggcagccttcagactgaagctttacttggcctactgaggtgatatccttcacactaacctatctgatgccataaatattatagggtttctcctctggctagtgggaatgagaactatgcccagctctatgtgagctgtaggaattgtttgacctattgcttgtcgaagattctttcctctgccttgtggagtttttttttttccacgttagcacagatcagtagttagccaatgtaccaggagaacctctctgaagatctttggacctctatctgggttcccctacttcctctttgggattctgtgctgccccccaaattctagctgcctctgcctcccaaacttttctctttatcttctcaattcagggaatcttctcagttctttttggattcctttcctcactgtggaccaaaactgcctccagtcattaagtttggggaatcattaggctcacctagtttgttttccttcagtgtctaaaaaccatttgatgtgttttatccacttttctagttgtttatggcagaggacaattcctgcagcaattaatatttgatggccaagaactgaaagttcctggatgtaacaggttatttttcagaactccccaaaactggaagaaacgcattgaaaaatgtggaggggaaaaaaagtacagaggcatcttttgcataattatgtgtggaatatgatgctttttatactcattctgagaaatggtccttgaaagtaatcacttgccagtggaagtttgtagattgtccagagtttgtggtgcatgtgacaagttaagagtctgaaaggaagtatttcttttttattatcagaatctttgcttttaattgctttattcactaaagtggataacttagacctcagctacagttttcagttattatacatggaagcttaggaaacatcacgacttttactcttggagaaaataatttccaaatcctagacagatgactttcaattggaagatgcttttgaaagaaagactcattagagggagtttcaggattttgtctcctggttattgaaacttgtactgaaggtaaaaatccaatggatttacaactttgcaaatcttatatctgaaaaaaagaatccaacttttcctagaaagcccactatgaggagcaacaccatgttttcttcattcattcttccaaacgtgaaagtcatgaaggaatataggcactcctctcgatgagtgctttttaaatatttgaatgattttgcctgtgaatcagagataaggtgattccaaggcaattaattgtaggcaatatatagtctttttctagggtaggattgagcgagtaagtgagccatttgtgttgagcagtggtcctgccatgcctgctgacttggaatagtctgctccttgggtttctccaggataaatgtttatgtgtcagtctcagtacttctgcctttccagtatgattagagccatatgaaaaagcagtgctgagcagaggtagggtggtttctggtttttgtttgtttgattgatttggggttttcttttttaacttcaaccttcaaggttgaggtatggttccatttttcatggaagattaaccctatttgtgtagggtaaggtgtaattctggtttccttcccccacaccctttaaaaagcatactttaagcctctctcaacgcatcagaggatgattactgtgagaaggaatgttctcttttggtaatatggagggggacgcacgaaccgaacaaccagatgatccagtaaataggtaggtcaaatggaggtgactggactgggctcttcagttactcattcctggattttgttgacttcacacaccagagagaccagagaggttcactgttaagtggctttatttctgtttcttttagaatagatggataataattgaattgaccttggtttgtatattatttcaaaactctagttgagaagagttacagaaataatgcctgtgaattggcatatgggaaatagaatgttgctagataggtaagtaccactgaaaatgagattccacacttggtgtaactggcagattcatggtagttatcttctagaagtaagctaagagaatgaaacactgggtgacagtagcagaggccggcttctgattgaagattcccctgggagaagcatgaaggatacagccatccctagctcccagttatgttcctgacagctaccttagcagtcttggatccatgtttctatggaataacagaaggcaccttggtctccttagagcacgttggctaaagatttgatgactccacaggggaactgtagatctctgattaatggaaggctttgttaggatagaagtgtcttttaatgtgttggagacagaatctgtacatgaaaatgacaatggtaaatatgttgtgaaactataataaagccatatataaaagaaacatttttatcatttctcttaagggcttttaaaactgtataatgttttgtctttttaagtttatttagcaacttgtctccagcttgtgtaatcactgcaaaatcccccaagggggtgttaaacaaggacttttgtagcagtagaaagtcttgttcgattttccagatgaattttttaatttgaagtctgtaggttgtgcttttgatcttctttactttaaagagtacctggccttggagcctcactttgcatcattctgcacatgtacaatgtgtgtgtgtgtctctgtgggtgtccccacagcaaatgctgctgctttgagtgtgtctaggtaacaacataatcttatccccataatttatgtagggtaaaaattaaatctagaatctccaaagcccttttctggtttcataaaatttttcacatataatgaaaggtatcaaggtaaaaggcaggttttattagcatttgggtatgtttaatttagtaaattattttagcacgtttcttaactttccgtttaaaaatataaaatatgaactttctgaaaagatactagattaagctaaattgttttttacccatgggagttttggaatataatttaggaagaaaaatcccattaaggaaaagcacaccacggtcctacagctgactgtcatcttggccagcacattctctcaaagtgccagtttcttaacctgtaaacttaaaaggttggatgaagtcatctctaaaatctgatacagtgataaatttttcatttgattgcactttgttacatttgtttccagttaggaatagatagaaactcagaaattattttatacctgtcactaaattataaaaattacaagaattcattaacaatactaggagctctaaggcttttcttagtttcagatccctggaaacaaactgtgtagtaagtgaaataacattttttaagtatgtggtacatggtggttacatggtagttaaactctgcataggatccgtaatggattcatcttttgtgaaatgtagcaggcagttatagcagcatttcatacttgtcctgccttatgtatctttttaaagtttaattatcagtatgtgattattcacagcattttcaacctcagtacttctgatgtgctttacagaattgtgaaatatacacatagaagagtgtttgtaatgtctgtacattttaaacaataatagtgatgaaagaacaccattgtattcactaccaagttatgaaaaaaatttctgtagaacctttgaagttctctgctgctttctgaatatgtcatcctacctccagcctcccccacattacaattttgaagttaatcatacctttgcctttctttagttttatcacacatatatatgtatccctaaatgaatcattcattagttttgcttatttttgaactttctttttttctttttgaacctgacatgtgaacataagaaccttctatttgtaatctgtcatatgtattcttctgttacttgcttttttccttaatgttgttttttgagattcgcacttgttaatgtgtagctgtagttcatgatttttcactgcttaattgttttaatgtaccatattttatttagtctgttgtcagtgggcctttgcgtttctagcttgtacatttccttgttgttaggagccatgtaatgacatagaaaatccttttgcaatgttaccagaaagctagcaacttctcaaatatttagttcaatctttgttaggggcattatgctctctttgggaagaagtatttcaggggaaaataagtaaagttaatgttaagattcatatattgctactagataatgagaatttcacagcaaagtcattatctagaaaactgcagttcctgtgtcagagggaattgagtgcaagtcccatgaatgagggaatcaaagatttcattgtggaaattagaagcagatgcttctaagttggaggattttccctgagaacagcactttttgttggcgatgtcatgctagaaattcatcttggttgaaaggaatttttgtgcctggttgctaaacctgatatgacttttgaatacagatggctgtgaaagtagtttctgtggtttaaaattcatgaattttaccattgcctttgttcttgttggttgcctatctaacatcttctcttatcccccagcttcccataggtacccaaattttggttttaatgtccgtgtacttcaggggaagttaacacaccgccagatctagatgtgggccctaggtggcttaggctagttcaactattccctgcccctgttcagtgctgaaggacttgtgaactctccagtcaggtagagattcagtattcttgtttccttccacattctggttgatttggccactctgagagatgccagccttaagatggagctgatttcagggtgccaggagaaactaggttctgtgtatgacaatgtgagccaccacatcaaaccacctgtggggccacccatttcactttaggctccaagtcactctatttataaatttcgcttatttaactagtcctgttgtttactaatagttaacacttatctagtgcttaccatatgccttataataccctataaagtatgtactgttataatttccattttatagatacggaagctgagatagagaggtgaagagactttgtcaaaggtcatacagttagtattaataaatagctggctaagagtcagacccaggcagtttggcttcagagtccagatttgagttggatatttttggtacttgcaacttagtgcgtcccaaacagtgtgtctccttatgtgtttgctttcacataagttggcttaacctgacacacatggagacttttgcagaaactattttgtggacagtgttggaggatcgtattctcacattatgtccactaaatttggagacaagaagaaatgtacacatttcctctataactaatatgcagaaaatattcaagaagctctgaccaacgctgactcccattgtgggggaaaagtgtgtcgtaaaggaacataatttttaacttaattgctagggattcattcacatttctggtaagtctaaatagtgtatttaacaagtcctactggatacctatacagagccagtactaccctgggcattagtgacataaggatgctgacagcctacccttgaggagactccagtcctccatggggagcaggagaaaaactgctgagttgcctaggaacgtggaggcatgcttcacagaccagcatcttgagtttccagggagaatgaagatattttgtgatttcattatgttcttttggagtgggtgggtgggtgggataatatgcaagggataatattgtaggcagagggaacagcatggtcaaaagcatagaagtatgaaagcaagacttgttcagggatccgtgaggaaaagaactgcagtaattcagaacatgaattggaaaatactcacactgaggaggaatgggacccgatggtgaaggattactgtgctttagtgttaggtgttgtcctgtggatgtgctgaactgttaaagaatgtgagcaatggtgtgatatgtatgatcagatatgcaatttaagaggtcaccctggcagcattgtgggggatggctttaaggaatgagacaagacagagaacatttaaaaatttaggtgagaacacagtgaggttgtatagtagagaagaaagctgttaaaaaggctagacaaaaggaaggatttttttttcttactaagattatataaaaatatacacacatgtgtatagatgtatatatttgctatatataatgcatactatatatgtatgatgcatattatatataatatatattatgcatatatataatgcatatgtagcatatatagagagagaacaaataatacagagagagcaaataattttcccaacctttcagtcattgaggatcactttcatttgtcgtttcccccaccttccttaggcttaatgtttggaaagattgtctgtcaaaacaaattaagtcatttgttttcttttttttttttttttttgctttggcatgtaaagctaagtgtgctatcaaaataagtgcctgaaaataatactaatattacttaagtgaaagatcttttaatttcccttgagatattattgtgggaaaatatgccatttctatcaggctttttgagatatttgaagatccccatcacttcttttatgggcttcattgtaatagttgattaacagaattatgcttattactgttcagtttaggaaggatataccagacctgtgctttggagaaatatgtttttaatctctaatgtaagacaagtgataatttcattttcccaagtacctattgtcattagcctttgctttgcctctgtaatcaaataaatagcgtgagtatggtggtagcagaaaataatgccaaagaagaagggggaagggttgagtccaaacagcacagggtgcaaaacctcggttaaagctagagaaggcgattcattggttgagttaacaaagaacaaaactttgaaaaacagtccgtggtgtactatgctgtgtgccatccaagcgaatcttgttggaagcctctcaggctttccaactgaagaaaagccttatatttcaggagaaggctctgtaaccaggcttctcatctgttcagtctgagtttgcatggggcagcagcacaggcccaggcctctccactagggcccttatctgtattacttcccacccttgcaattctttcttctccccatacatgctgttaacctcccttcatggaatctttcctgaatgccatgctcctcccagttctcagccttttctcaaatcccacagccttcattttactgtacagtttagcatttaatttaagatgtagttgcattacttcctattgtttctacgctattaattttgactcttgaaagagtataaactgtctaagggctaaaatttagaaatggtgttgagagacaaatatgtatgaactacactttaacaagtgctagagttctcaaataccagttggtttatgcttattcattgactaacagaatacttatgatctttttcttgctttttttttctctttgatttagcagctttctttattcctgctagtcctattctaaaattatatagtgaaagggtaatttttggctatagtgggtatttgtgatttaggggatgatgtgctcaataaacgtttattattattgatgttatttttttatatactatgatttactaatctgttcctgtcttttccctatttagatttttctcattttttactttgataaataacactttagtgagtacttttgttcagaaatgttgaatgctttgtttgaattatttcttatccattcgctgcaagtgggattattgggtgaaaaggtatgaacatctctatgactcttactacaaaaaaagccaaattggttgcagtgatttataatgctaaccacagcttatgattcgatttcactaatttttctctttattgcaatagaaagttctttgctggtctttttatattctcccttttctatagctgagtactacccacataatgtttttcgttagagtatgatgagcattacttggcaccaatgcaagtccactttaattggaaggttctttttttgttcctaaccccgaggttaacctcattggttaaatacagaagttaaataatctgttagctgccaacaggagaaaaacaccatttatttagatttcaagatatgataaaatagcatagatagtgaccactacatgtttgcaaacaacagtgcttccacttgctttccatgatatgaagccagttatgtttcttgctagtaaatacagtaacacatactgtatatcaagctctgttcaaagtgcttcacatatgagtaacccgtttaataaacttcacatgaatctcaattcaaaggtgagcaaaattgatcaaagaagtacagagacttgcccaagggtacccaggtgggaagtgtctgagcttgggttcaaacccaagctgtttggctccagagtccaagctcttaacagcctattatgctgcctactgccatacagtatttcctctttcaaaacttagcctttctgttgattcaacaactagcctgcatttcaagtgacatacacagccacttacaattgtatagtataataatgttacagtcagattacagtttcttagcttgcatttggtaattagcttaatggttttccccttaccaaatttataaaatatgcttcaaattaaagctatttttactaaaattgctatgattacactgtttactgatcaattttcaaattacatatcaaccatgctttccagttattttgtttgcagtaaaagcatttttttacagctactctaatttgttacaaatgtacaatacaataaaagcatattctgcgtgattctgtaaaacacattgtggtctttaataagaggactattcacccacacattagtatgcaagatgagatattcctttgttgctgaaaattactgttattaattgcccaatatgctttgtttgccttaaatgaattttgcattatttccataaattatttactgtgttagtgatttattttgaattattttctacttatatattccctgtaagtgggattattgggtgaaataataatttactattattttaacccaaccacctaaatttttcagctactcagattttatcccccatcttcttggtcttctctgcttatggtgaatagtgactattctcctttttttggattggagagaaactttaaaacttagagcagttttttgtttttttttttaagtaaagtaaatatcaatgttggtatagccagagataggaaacagtgaattaatgaatgaatgtatcaagcagtcagtcagcttcttgtttggattatctgtattagagaggacttactctgttgcaagtggcagaattaacataattagcttaagataacttgctggctcactatatgagaatttctatggatggtttctggcttcagatagctagatgcagcagttcaaatgatgcaatcaggattctttctgagcttctctttcctctgtgatgatgtccttctcaggagatttcttaccatgtggcatcaaagatgattgccagcaactccaggctcatattattttcacaaagagcaatacaaaaagaagagcagctctctccttcccagcgtttatatcacaaatttcatggaggaattctggttttgcttgggttacatgttcagcatttagaccaagcactgtggttggagaatgaaccctgtttggccagctgtgagttacatccctctcctacatcacccccatcagccagggtggggacaatacactgtgatcaatagccccactggaaagatggtgccaggcagactaaaacagatgtcctctaccttccattctttggtcagccagcacacatttcaacccatacacccatacgcactgtctttcagtacataaaatttcaaaggagtaaccacttaatataatgccacttttccatttacaaccaacaatacgcttaacttccctacccaaaagtagacttcttaaagtttagctcatttgctacatctggctccgaggcctagatctctgtatgagtgtatttttattaatcagttgtagatattccttctcatgacctggcaactcatgactagtttttattttttttatttttgagacagagccttgctctgttgctcaggctggagtgctgtggcacagtcattgctcactgcagcaatgacttgagcccatctcctgggctcaagtgatcctcctgcctcagcctcctgagtagctaggactacaggcatgtgccaccatgctcagctatttttttttttttaaacttttttagtagaaatggggtctcgctgtgtttcccagactggtctccaactcctaacctcaataaattttcctgcctcagcctctcaaggtgctgggattacagatgtgcgtcactgtgcttggctttgactcttgttttaatgaacaatctttcccacccaaataacctgatagctaatacttatatccattatctcatttaacccttccaataatcttaggcggccaatactacagatgttacagatgaagaatcagatttagaggtcaggtaacttaccgaaggtcacacagcaggtgttgtggaatccagattaagatccagatttgactgatttgagaaagggttatttaacccttaaatctatcttcttaatcagtaatctgtttgtattgtctctaaacatgaggttaagccatatcaaaggcgatcttagcctttccacagtgcctcatttatccaccagagcaatggttggaaggtaggaaagagacggcaacaaagaatctgatgttctttccagagtatttggctccagatggttgatagatgtcaactactttctttataggtaaaatggtaactgtaaaacaggccatgaaacagagtgttcagtttatctctcaccttaagtgagaaaagtaaatctgtggctcctaaatgttttgttttgtttttaaataaataaatgacccttaaaaaaaaaaaaaccctcatagtacagagtatgcaagcaaattaaaatagttgtttccaggtcagattttatattttcaggtactgttatcaaaataaaggactcttcaggaacaagcaggtggggattgtggaagtgtatttatgtgagaagtttggctgtatactgcagtaaatatttaagttttaagaagttaaacttcaaagctattccaaagccagaggccacacacattcaagaggttgaaaattgtctttaaagttcaagccagatttctgagtttagcactcagttgctaatctttagctggaaaatatgtatttagtaagaattgtattattaaataaaaaacagctggatggtaaaaagtagcccatagtgtctctatatggaaacctgtggagcactagttctcaaccatgggtaattttgcccccagagaacattctggaatgtctgagggcatttgggattgttacaactgatgggagaggggctcctggcagctagtgagtagaggccagggctgctgctgaacatcctacaatgtgcaggacagccccccaccaaaaagaatatttggcccaaaatgtcagtagtggcaagtttaaaaaacccttcagtagaatcttcatgtataggaagccaaacagctaacatttaatgagcatatactatgtgcctgtcattggagattaagcaaaatatgtagctagtgaagtgaccctcctctgagaagagctgagtagaggagacagacaactgaggagtacttacaaggagtattgcacaagtagattatccacacaaggaaaaacttcttactgagcatgagttagtcacagcaccagaccagatccagggagaggggaaatagatcccacctctgaatgggaagcatgagagtgagtttgcaggtttccttaacataccataagtacctaacagtgcctggaacatggtaagtttgtagtaaatgctagctatcattagcactattattttgccttttctgaacagtaagtgagtcttggcaaggaaaactcttgcctgggatagatggatggatggacagatggaaggaaattacatctctttcttcatttagatgtttccttaaatattgactcattagagatgcttcccttgattaccctatatgagatagcatccacaccacaaccatatctccatcaactctatcaagtactctgggcctatttttcttcatagtacatgtcaccatctatatcatatgcttattgtctgtttctattagagcagggtatttttgttagtgctgttagtgtactcagcacatacagcaacatttggcagacaggtgttgaatgaaagaatgaacaaaaacagaactcattttactaaagacattttgatatcacttttgggataggatactatacattaaagatgatacagtttattccagaatgatcttagctacagtattcatagcacagtatttgtgtacttaatactgttatccattatatcttcctttgaggttggcatgagagttgcccatcagagtatgtgtgctcttagaaatcgggacaatattatcgttttaagcttcttggcagtgtgatatgtccttaactagatggtgaactcatataggtggagggggagtatctaatgcttttgtattctgcttttcagcaaataaatattaccgtactgtgtgtgtaacacgagctgtataaatgtgtgatgattaaattagaagataggattctctacaatccagttttccaagataaatttttgccttgtttttgttaggtgatgaagataccatattgactgttgatacatgcctacttagtcatgcttcgcttacagtaatcttaacaaattaccagctttttactttttaagagacagtcctagaattgaaaatcctcctttgcctacattcaatatgagactatattatgtgggtaggaaacttctggtgacctacttttaattttaaaattaaaaaaatacttaccttagttttagattcagaaaacagttgcaaaggtggtatagagagtttctgtataccacaccggcacccagtttcccctgttgctaacatcttacatgattatggtatatttgtcacaactaacaaatcagtattgatacattataacaaaactgcatacttttaggggtagtggacccagttttaaagcttttttcccacaatttgttaaaaatgacaatcagtattgaatgcccatgggtggtggcttcctgattcttaaaagaaatggaataattttgtaaccattgggacttatcaggaaataaggagcttataataatgtgcacttaaagttccagtgggggaattgtatagctcaacatattgtttttgtaagttggatattaataaataaagaggctgggtggggtttgatcactattaaaactgattttttttttgttccctggaaaatatgttactaccacatggtctacccttcgaagataatagatcctaagatcattggacaggaaagggttgccctgtagtaagaaatgtgtcctcctgggactgagttgagatttagtttaggatacaaaataagtagccaatggctgttgtgaggctgacttctaaaattcaaattggtataaatttaatctaattcttttccccaggactgcccaatttaagattaagttttatactggtgcatattagagatatggctattttgccatttcattggagccttttaatcagctttaatgctgtcttgggtaaagtaaaaacttaaactctttctttaagggcttttctagtttgccatcctcaaagcagaaaaagcagcaatgaagcagtgctgcttcgtatcgactctgcttttattacatttgcttcaataatcctcttccagtcatcttctgtgctgcatatttgagccataaaataagcaaaaattgtacccaaatgaaaatttcaagttattttaatgaagctctggaaacatcccacagctcagaagatatttttttctagtttattttttaaattctggaaagtaggtcagtagacataccctgctttaattggtttaattagaagtgaaaaattataggactaactcaatttgaagtacagatttaaataagaattacactgggatgaatattacttaagggtttgaatttaagatgcatttaatcaaagcttataatttcttcttgaaaagatttatattgcaaaaaggaagactaagtgttggaatatatcaatatataggggaaaattttgtcatgaaatataatatttgataaaatcattttagaattgtatctctaaatggtatgcctaagaatattgttctataggaccttaatagatatgccttgggggaaaaaagtattgtgtgcccaagtaagtttgagatatactgcattaaatataagaagttgcctgcaacacttctcagagcctttaacactttctgatttctaagagaggacatatatagggtacagtactttgcaaacctatttatccctgtaccacctagtaacatttttcaggaaaatgttttgagcacacaaatttgacctgttttaggaattcatacctttgacaatgttgaggaccttttttttctattataaagatgatgtgatattcacctatattactttttcccaattctctatctttaagatatttttccaatgtattatattcaaccctctgctcagtcccttccttctgctaagtaaagtggtggtttccatctgttgctacacatcagaaatacctagctctgaccctggagattctgtatgaatagaaatgccagaatacctgctcaggattctgtgttcattacaaacacccaggtgattctgatgcagccaaccctggtcctccaactgatgctttggaattgttgaaggaaaagcatgcgtgttttttttttttcaagatggatgagtagcttggggcatagtttgtggtcctagaacacatgggttaaccatccatcctagtgagaacgatagcacaggcctccaatgaccccatgaggtgatgtactggctataacctaacatgagatgattattattaagaaaagcagaatacttctaaatgggcttttagccaccttcctaataatgaagtaccgtatatatgattaccatttgttttagtttcgagtaattcccttgtaaatgatgttttatttattctttaagaagaatactagattatattttctaaatgtgccaagtatctaagaatatattctttcccctcctgctgataagagttatacatttaaccttaagcaaatcggccaagattctatttcatttatgctttgatttatgtgagtattaatgtattttctgtgaaaattgtatggttatatatactctccacctagtaaaacagttccatattcctggaaatagtcttttacgtcctacaaatgtagctggaaaggaataatataaatactaatggtttgacagacgactagtcttgacttgtcttggttgaatagtgttctattagcaacaatatatgaaatactagacacacccattaaaagtagaaaatacccactactgttttaaaattattctgcaagatctcactaatgcaatgagacataaaacagaaataatgggtgtaattattgaaaattggagataaaatttctattacttgcaaacaaaattctctatgtcaaaaacctgataagttaaacaatacagttaatatgtttaatagaactaattagatatgagaggcatccaaaatccattttttctatacaaacatggtttgatatatacagtcttgttttatctgtgtattaattggcttatgaaataatagaaaaatcaagtatgcattattaggttaaagaagcaggagagacagagctataaaaactaagaagaatgttgtaaggagggcttagcaaccaggataaatgttgtagagagatcaattaaagtgatggcctagagatcatgggcttcctttggcagagccatgttggtgaagtgaaggaagtgtaagccagaccacagtggttgaagaatgaatgtaatgtaagagccaagacatttatttgagtttgatagttatgaaaaagaacgagaattttcttattgctgttgtttttgccatttcatgttcaaaaccctttatctcccatgtgggactgaaaactcctccaagacaggatctctgtttctgtgagtcctgtagtacttagtacatccttgaatgtgtgaggctctcattggttataagtttaattcctgactgtggatgaaagctttaaaactttgtgggcaaaatacagaatgaatttcagtgagttcccatgtattaaataaggtggtgctggctggagatatgctgtccctgtgcccacaatagtagtggtgctgtgcttatcttcctgacgcgctcttcgcagtcttcaccgcctttcttcaggagtctcccctttggctttttcacagctatgaaacccacgtagtcgaacaccgtgatgcttctcctgcagggcgtgtgatgaggaggcgagcttggctttggagtgctgggaacctgaggaattgccaaggacccagagcccagccctgaccaccagagtgcccaaaacacaatgaacaaattgaattttcataacaacagagtcatgcaagaccgccgcagtgtgtgcattttccttcccaacgatgaatctctgaacatcatcataaatgtgagtagatccagttttagaaatgtctaaatattgtgttttcaccagtggccacattcaacttatgacttgattaagggtgaaatctttacagaattagggcagtaatcatgtggcagaattgggttgtcaaatagtccatacatacattaacttagctttgtggcttgtgtgcagctgccttcaacattctctcacctgggttagaattagaggactatggttactatattgaaaaacaaacatttgctatttttaaacttttgatcgaaatataacttttattgaagtatatgaatttatgtcttaaatgcttagagttgtcacccacacacatgaaatggtaatcatcgctattaggttggtgcaaaagtaattgtggctttcgccattgaaagtagtatcaaagactacaattacttttgcaccaacctagatagttttttttgttttttgtttttgctttttgagacagagtctcactctgtcacccaggctggagtgtagtggcatgatctcagctcactgcaacctctgcctcctgggttcaagcgattctcctgcctcagcctgccgagtagctgggattactggcacgcaccaccacgcccggctaattttttatattttagtagcgacggggtttcaccatattggccaggctggtctcgaactcctgacctcaggtgatccgcgtcagcctcccatagtgctgggattacaggcgtgagccaccgcgcccagccttagatagctttttaatatgcatcttgattttatcttaagagtagccaaaatctagccaatttccaggactaggtgcctataggctgaacatttgagcactaagctgttgcttatggtttgtgagtcatagtcagcttgcttagataacctgaacattgaggaatgtgattttttttttaactttaaaaaaattgagttataatttacatactgcaaagtatagaaaccttatgtgtgcagctcaatgaatgtttacaattgtatacatccatgtaaccatcactgtttgggatataaaacatttccagcaccctagaaaggtcctttgtgacccctcctagtcaatatccttcacctaaagggtaaaaactattctgatctcttgtcaccaaagttttgcttgtttcttaacttcatgaagctgaagttatgtgatatattctcttctggcttcttttactcaacatttgtcctgtgaaatttattcatgtgaatccatgtgacaataattctttcttttacattgttgtgtgatattccattgtacgaatacacccaatctattcatctactgttgatggatagatattgagttttgggctattgtaaaactgttatgaacatgttatgtgtatgcacatgtagaaatatttcttggtttatactgaagagtaattgtgaatcataggttacactatgtttagccttggtagagactgccaaacaattttatggtaatcagtgtcatgcctaagatttttcaacccctctctgtgttatcaactttcatactgtttctttcatagattgtattctgatggaattagaggaaaaaattgccttagtgcatgacttgaattagtttcctatatgttactatatttttatttatttattttgattttgattttttttttttttttttttttttgagtcagagtctttctctgctgtccaggctgcagtgcagtggtacaatcttggctcactgcagtctctgccttccagcttcaagcgattctcctgcctcagcctcccgagtagctgggactacaggtgcctgccaccacacctggctaatttttgtaattttagtagagatggggtttcaccatgttggccaggctggtctcaaactcctgacctcacgtgatctgtctgcctcagcctcccaaagtgctaggattacaggcgtgagccattgtgcctggctatgttactatatttttaatccaattgctatataaaagaatatttctaaatattatgctgaaatatatgacatttaaataacttcattaaaaagtttagctaagaaaagtttctgcttattgctatagtcattttggctttattctgacaatcaacccaatttcttaatttactgctgtatcctcatttttgcttctagggattgtctgaggatccaacaggcctgcctattggatgaactttgtcatcttttgggcagaatttccaatgattagctacattgctgctcagggtaactgaaattgtttttggatgtgtgaagtggtgggctactattttgacagcatttggttttttaaactgaataaaaatcgacaatgtgtctcttttttcagtgggggcactagcaatataagttataattgaatcctacttacatatgtgaatattttgttttactttttatacagttatataaaagatatccaataatttttaaaaatatacataatctaggacatatagcataagcacttaagaaacttctctcactttcatttgtctttttacgtggtgcaatgtgtgtgtgtgtgtgtgtgtgtgtacacacacaagcaggttgtggaacaacaccttaccacatttaagtgaagggaaggctaatctgacagtgaagaatactgaaagctgactataattttcaaataaattaatttatactaaaatctcagctgaggaagatagttatagagaacagactggaagatagctagttcatttgttcctatggatcagtggttttgaaacttgaatatatatcagaattatttggagcagcttactaatattcagattgtgtagtctatggccatactaccctgaatgttgcctgatctcatgtgatctcaaaagctaggcagggtcaggcctggttagtacttggatgagagaaatgccgatgtagtgagtctgaggcaggatgcaagcatctgccctaaatagatgctatagatactctaaaatttgagcgaaacaggcaaagatctatgtgccagcaccacctagtttctttcactctctggaattctggttactcgattgtgtttcaacttgcccagtacctggtacctagtgggtactgaatttgtattagcttcatttctgtcttccctctatagaataatcgaagagtagtatggaagtgaaaacacatggatatacttaaaacacacagacctgaattcaaatctcatatctgaatgactttgggaaagttaattatacctcttccagcctcaacatcttcacctttaaaatgagaataatacttacgctgcagggtgattgtgagaatttaggattaacactcagcataatttctgatgcatatataatagctgctattatcattttaatccctaggcagagataaattatactttttcaactcttctcttttacagtgttagtatgataatctctctaacatggttaggactatgatcatggactgtgaggtcatatatcacgattaaggtgggttttggagtcacaggtacctgggttgaaatccctactccacaactttgcaatctagggcaaattttctagttgttttgttttgttgctttggtttcctcatttgtgaagtagggataatcttaccctctgcacagggacattgcaaggatttaaagatgtcacatgcatgaagtattcagtgaagtgcctggcatatgtgaattgctcagtaagtgaacccttgagtgtcagtttactttttagttccttgaactgtttgttcatttcattagtgtactctgttaataaaccaagatgaagagtctgaatcccatgtaggcctgcaagatttcttatttcagggcaggtctaaggtaggacacaagcatgtagactcactatgcccaaactcctctccagtaagcggttggaccaaagaagggactaggttacgtaggatggaggcttccccactaccagaaaaacaattcatggctgccaagaggccctccctttttacaaagtgttatctttgtgttcagaaaatagcagtcaatgtgtatagagtttgagtgtaataaattaactgtagcaaaaacgattttattaactaattttttcataatttctctctctataacaatgaaagtttgttccctgacaggtgtggttgatagaatgttgcctttttgcatatggaataaatttagtgttttggtcattctgaattccctgtgagttgcattaatagaagctattttaaatgattttaatcatcaggcaaatatggaagctttggacaattttggaagtaaaaccattgtaaatgtaggagccataaagatttgagtgaagtaattgtggccacgagcttatatgtcttcactaagattaagcaattctttttttctagagtatattttaaacattcctgcacaataacaaaccattaacatttaggatcacatactattttaatttaaaagtccatatagaggctgggtgaggtggctaacacctgtaatcccagcattttgggtggctgaggcaggagaatcatttgaggttaggagattgagaccaggctgggcaacatagtgagacccctgtctctacataaaatttaaaaattagccaggcatggtggcactgccagtggtcctagctacttggaaggcagaggtagcaggattgctttagcctgagaggttgaggctgcaatgagttgtgatcgtgccactgcactccaggttgggcaacggagtgagaccttgtctcaagggaaaaaaaatagtccatatagagtatatttttagataaagctttaattcttattcttaatacctcatactatatagcactttttaacattcccattgctcctgaagattaaagaacttgagaaattttacagtcagctaaaatgtagccttaaagactcataatatgcaaatacagaaaactcaagcttattttcacagcaggcaagacttcagagccatggccttatttaattatagtttttgaataagagcactgcttacttgatatttgttaaagagctttaccagtaggcttcaaatacttgatttaaactagcagaacaataataaatgtatgggctgcatggaggaaatatataacgttatttggtctacagtcacacgagcctaaaacagtttatttcctatacatttagtttgtggtttggaattttaacttcttatggcattttatcttggctgccttgtacccaacgtttttaaatacagtcaaactaaggattaaaggtgctgtaaacaacatgacattttaagtcacaaatttgtagtatatagttcaacttaagaattttatgtgataattgatgtgttctcctcttctttatcattgtttaagtttatttgtaaggtagaattacgatgataatggaactcaaaatccagaggccttttaaagtgaatgttggaaatgacataggacttctataggacagaaatctagaatgtcaggtgattcaacctagctgtacacaaagagaatgataatgattccccattggcaaatgtgttctccagtggtggtggtgggtgggtttgcatttatacagttttcctaaaatgctgaatggcatatttataaaatggtttgctcagtaattcagggagtggtcttgatctctagtcatggaacagaatgaaggtgagcaggagcccacagggaatcagattcctgcctttcattcatcgaacatttactgagtgcctactatagatcctgaatgtaaaataagacactgttcctgcatgagttcctggtacttccaagcagctcacttggtgctactttggtcttaaatatcttctgctctttccagtgggtaagatactttaggttggttgctatttaataatgaatgtggaaaagagcagtaaacccattcttcttactacagtcggaattatcaccagttctgaattgtttactttcaaatttcaagggatcttggcgtgtctttattttcctaatctgagtttcatattaagatatgataaagtcattaattcagagttaatttttagaatttataataacttaaactcattatcattgaaaaaaaggatttgaaagcagatagtactaataaaaggggagaatgccatatgtaatgcatataggtaaaatgataaactgtcatgttacaatattttaatatatatatttaataattaaggtattttaatacacaaataagctgtgagttgctgcctttgccactattagtgatatgactttaagctttctgagttttattttcagaaaataaattgacctgggtggtttcttaaactctatccaaactctaataaaccttgatgattctgaagtcaacaagatagaatcagcagaattactgtcctccataatactactttaaacatttgagaaagcattattatgagataataattattatttgtaataataatacaaatattatttgtatgagttattatttataataataatattgagaaagaaaattgtatcttttaaagactatcagttaacttttgacttgtcagaataacttattgccagagttccaaattaatatggctttgtgattgaagtatactaagactcagaaaaggaatctggtttaggcactaaaaatatattagacaaaataacagtgataaattaaaagctaggcaggctgggcatggtgtctcatccctgtaatcccagcgctttgggaggccaagatgggaggattgcttgaggtcaggagttttaagaccagcccaggcaacgtagtgagagaccctgtctctacaaaaaaaaaaaaaagtcgattgagactctgtctttaaaaaaaagtctagaccaactcgttgtacagtagatgagtttttggggtagactattaagaggaaagctttccttgaaaagatacttgtcctgagtagacgtccctcaaaagaagatacacccatgaccaataggcttatgaaaaaatgctcggcatcactaaatagcagggaaatgtgacatctcacacctgttagaatggctattatcaaaaagacaaaagataacaagtgttgacgaggatgtggagaaaagggaacccttgtacactgttgctgggaatgtaaattagtacagacattatggaaagcagtatgggggttcctcaaaatattaaacatagtactaccatatgatcctggaaccccattcctgggtatgtacccaaaggagatgaaatcattatgtcaaagagacatctgcactcccatgtatattgcagtattattcataacagtcaaggtatggaatcaacctaagtgtgcaccagtggataaatggataaagaaaatgtggcacatacacacagtggaacacaattcagcctttaaaaagaaggaaatcatgtcatttgcaataacggatgaacctggaggatgttaggtttaatgaaataagccaggcacagaaagacaaaccctgcataatctaaaaaagtctgactcagggaagcagagaatagaatgatggttacctgagactgaggagttagggggactggggagatattagtaaaaaaatacaatatttcagttaggaggaataagttcaagagatttattgtacaacgtggtgactgtagttaatgatgatgtatacttgaaaatgctaagaataaattttaagtgttctcaccacaaaaagatacatatgtgacataatgcatatgttagtctgatttattcattccacagtatatacatatatcaaaacattatgttgtataccataaatatatacaattttattagtcaattaaaaaaacaaatgaataaaaatttttttaaaaagatacttgccaaataaatatttttagtaatctgagtaggctatgctgcttactttctgaaactcatttatcatttatcatgcaccatggtttcagagctttgtccatgtatggtaagatctgtgagtcttgtactttattaccatgttgtaaaaactggtactgtgatcatcattactgaaacacaaccccaggttaaagtgatttggataaagcagcagttgttttctactgtcagcttgtcctttcaaggaatatatttacgatgcattaaattgcctgattgtggctccctgggtggacttagttgaattgttattttacgtcgtgcctttttcccctacaggttaagattctgtgtcaccagttgctggtccaggtttgtgacctgctcaggctaaaggactgccacctctttggactcagtgttatacaaagtaagtcttagagccctctctgatggatttagccaactatccctgaggaaatgacatcttatagctataacttaaattgggcctattgttataaaactgtgattgtcaaaatacccatggactgattttcatttttagtgtaggtgtagtatttaattttttaatctcaatttctatgtattttttacaatatttaggattttaggcatttatttattatagtttgaacttaaaaattgattcctctttgggaatctagattctatgtgtttgctcttccatgttttaatgaagcaagcttgatttttgtttccttgcattcagggagcagctggaatacttaggaaagtaatttaatttgttttataatttttgacattaaactgacttctcttttcaagttatcttgctattaactatatagtatcacaaagtaattattaatttaatcttattttttatttttctctcgtaccccttctcttttttccagtcagactatatgacttggaaatatcgggtcagtttcttctatattctttgtgaggagaagatttttaagtaaaggacttcatataagctttcttctctcataacaccttagttagagttaaatttctgggacttctctaaagccatttattataagctttcttccttcaaatgatatttttaaatttctctaatttagtcttctatatatctttgctcattttgtcaagaagagttttttttggtgcggtgtatttaattctaattcttgaatatggtttattttctactgctggaattggtttaaatttcaaggcttaagatatcttggaaatctggtcaatacaataatatgtttacacctgccaagttggaaaggatatcagtataaagttggtcagctgataaacaaggcccctttcccccaaaatgtagactgttttcagttgcctttttaggagaggctaaagagcatggagcagggaacacatcaggaccttgtgaatcagccatttgctcttcagtttcttcctgtggtagttaaaacaataaaacacagttgctaagctccatccttgtgttagtgcatacttcagtcgttctttcagggaagagtctgagagccataagaggctctatagattctaagtaacttttagtattccatgctcaaagttaattcttcttacaacaactactgctagatccttattgttcaacaaataagtccaataaaaccagtttatagcttccttaggtttcaaaataatttttaagatgtcctttttaaaaaagagatagtagtatggcgaaagaacattgaaacaggaattggttgacctggttctaattccggttgcacccctaactagcacttgacttctctcaatgtcagttttttcgcgtcaaatggaaattactactccaccagctttgcaggattaatgtgctttgagaattcttaaggtataaagctctggtcagattgtaggtggcagaggtatagtggcagtttaaaaatatatatatgtactattatggtgaacagtcttaattctattcattatgttgcttctttaggtgggaactcaagccaaacacaaatcagtttcgacaggaagattgtctggtcttgtttatttcatgtttaatcagtgatatgagagatgggagatagtgttagttgacctaataactggatttaagtagcattcctttttttgtctctgggatctcttttctaaccctttcattaaaattggttaacttaatgtcgtttataaccaacgagtaactttacccttcctattttcttctggcatttttccagtcaagtcccagtattcagcttggagtcaaagtgtagcaaagtgtgcacatctttggagtagtcaaagagacacacttccagaacaggtacatttttatgcagagctttccgtgaagatgtctccttagtgatagttagaataaaaggagtttaaaaaagacttgaaactttgtacagtataggaatgccaaagacttcttttgtgaaatagctctctcttttaaaagattatctttgggaaatatgaaaacgtttgttttctaccagcttcttttcacgtgtttagatcactttaacataggttttagcggtcttattttctgttcaccttatgagcatcatcccctggaagggatgttttggcatccatacttgtttttcataaaatgtttcttctcttttccatgaaattgatcccaaaggcagtgcgagtaagggtttatcattttgtcatgctgtgttttgctgtgtgtggaacacggacaagaaatagtcttaaagattagtcttcacaaaatgtgggtcagacttctcacttggaaatgagctgataccgtgttttctaatttcttacatagcaattaagatagtgtttctgccctgctttattattttgtacctataagagcaggcttctttgagctgaacaaaagcatgttttcctaagactaacacccacagtgttagaagttagactgtaagtcataatgaccctagaaactaagaaaaagcagaagttggaatctaagatttcttctaaatattatatactttaatagtatgtgttctgtattgcaaaagcaaaataattcacaagtatctcattaatgtctagttcacagaaccttttgtcttctagtatctctttgggttttctagtatgtgcattcagactacattcacaagtcttgaggctttaaaagaaacttgtttctttctatattttttttcttttaaaaatcctttctttagcatgtcgtctccttttttttaatgtacagataatgaacatgtgtatatggagttgtcacaaaagctttacaaatattgtccaaaagaatggaagaaagaggccagcaaggtacgacaatacgaagtcacttgggtgagattacatttataagcaaaattattttgattttttttaaaaaatgtttattttagctgttatacattagaagaaaactgtaagcaatactttatgtactatactatattttctactttatctactaagttatatatagtatatgtatagtatatatatatatacactttagaacttataattttcttttcccattttctatatatgctgagtatatatatagtagtatatatacttagtatatatatatagtaatatgtatagtagtatatatagaaaatgggaaaataaaattataagttctaaaatgtatatatatatatacttagtatatatagaaaatgggaaaagaaaattataagttctaaagtgtatatatatacttagtatatatagtagaaaatatagtatagtatataaagtatatatagtatatatacttagtatatataaaaaatgggaaaagaaacttataagttctaaagtgtcacattaatcaagtattaatagcttatagaaaataataaatagaatctggattatctgttaaataatgttggataataactttagtaatcttggaataatgcttttaaatgaaaagtatggaaaaattatttgctcttcttttttggctatgctaggtgtcaaaattgctgttctagaagttattactaatttttaaatctacttttactgtacttgcatttgatgctttgtccattcattgtactggtgctttatttcacaaacattaatttcatttacatgagagaacattaatagggaattcacctcgtgtttccagaacctccctagtaagtcaggaatagtaatcctagatcctctaatttgtatttaagaagtcttggagtaaactagaaggctacttcaaagccagctgcaaagtaaagaacatgaatgtctaaataaacaaacagcatattagaatttggtatgtggaatgtcagaggaacaagagaacatttgtaataaggagcaaatggtcaccacagggaacagagctgagcgaggagctgggtctcagctagaaatttccactggcatttatttttatcttcccttatgttgtcattggcattacagtgaatgaaaatcagatagaaggatggtgccctgtttcgctttataacttcctaattgtatatgaacctggtatctatataggacaactgtctacctactacaagcccctactcattataagtaaataaaacctatcagtgatcaaaaagtatcttgcaaataattgtattttggttgcttttgaaacccattttcaaagtaactagaaatagcttgatttttgtgtgtgcttttgtttctagggtatcgaccaatttgggcctcctatgatcatccacttccgtgtgcagtactatgtggaaaatggcagattgatcaggtaagaggacagggggtgattctaaacgcttttttttcccccatagcactttttctaacataccaaataagttacgtgtgtttattctttgtcttcacctttaggatataaactctgtaggagcagcaatttttttctttttaatattttgtacgctggtatatcctcagtccctaaaacagagatacaataggcattcagtaaatatttgttaaatgaaagaatgttagactgttgataaaaatattaacagtatctattggcccacattttctccactccacgttttcataaccaaatcagtctccaaaaagatacttatttcaagaagaaactagcacttttgtaaagagtgaggaggttgattaaaagattatgttcttttccagtggtaaggtgggagtgggtcagaggcaggaactctcctataaaagtggatgggtgtttatataatcggttttcttttcatgtttggggtcttgtttatattcttggcagtagccttaaaaccaagattaagcccagtgaagctatcctatcagaatcttagatgcaatttgacaagggcaggtaattgattctttttctggaggtgtgtgcatgaacagtagtaggctcaggatgcaaattcagaattcaccatttcagaagctcggtctgtataggaggattcagtgctagaaaactttcagaagtgatttcttggccgatagaaaatactagaaatatgaactctgttttgcttatatatttttaaactttgagaagttccatgtgaaagaaacaaaatacatatggctagtgagttatatgtaaaattagctcttgatatttttatcaatgccagatgcaaattaaaaagtaaaaaaattagcccataaggattttttttaaaaaaggctaagacactttattagttatccttagtttacatacaatttttacttattttacctggtaagtgtggcatgacctggaaagaaggaatatatatatttaacaaatagttaaccccctggggctaagttttaatgcatccctatacttctgcccctttttcccaggcatgaaccagtccaaaccatctgtggttggcattataaacaaaagtgctctgaaaagtactctgtcctaaggggggaaaatttacataaatgctttatttttaagctctttctacttaaccatggtcttagtttaaataaacccatatgtgtttattgttatctgctaatgacatcagctatgaatctcaggtaaacattcaacctgaaataatgtagaggcaaatgagctcattaaaatatgtacacacacatttttactttgatcacaaaagcatcctatttgccagtaaatattttttggagcttttaccatgttttccccagtcagcatttcttaacgtatttaatgatgactgtatttatttctgatctcaagagattgtaatgagtgctctgttagtatttccttttgtggggagtataataattgtcgtgacatgtgcctgtaaaaacataacagtaatgtaacattcacttcaaaaaaatccccaaaaaaagatttaaggaaagcattcattgcatttcttcttggagaagtttaaaaaacggaaaagaaacctttgttaagcaaatttttttccagaagagtatatatgcaaatacttataaagggccttagagtatttgtagtgtgttcagttaaaaaataataaaaagaacagcaaaacactgaagcaggattgctcctcagatttttccttatttatgtcacgtgtgtagcatcattgtagcaacattagtacagacaacacatgtctagtttctattctaatacttgttcagtgaaatatttaccattttagagtggaatgattcagacctttttcttctctgaatgaatcaaatgctgtaagccttaggaaacgttatttttattgtctggatagtctgatttggggttctgaccccctgcaacctcagtgaggcagctatcagatattagctacaaccgcttccttttcagtgaggtgggagggaggagcagaaacagaagggttcctgtcaccagatggagagaaggatttgggttctgtttacatgtcattggattattccatcaaaatgtgagttctgttttcttttatttttctagtgacagagcagcaagatactattattactggcacctgagaaaacaagttcttcattctcagtgtgtgctccgagaggaggcctacttcctgctggcagcctttgccctgcaggctgatcttgggaacttcaaaaggaataagcactatggaaaatacttcgagccagaggcttacttcccatcttgggtaagcactgttttcaaattcgaaagagtgttttctctcgggcatttctagttcgtagtgttgctactcatactctttaagaaatgggaacacagatgttctgtggccaaattctttgtgatgcccagatatttaatgcttaagaacgtggtgcacatcatgtcttcatgtacttagtctgcttatggtgagtggggtagagaattgccatccatcctgataatacagtggagcttggaatttaccagcctcctttcagcattgacatgcccttgaccttcttgcctactcttaccgaagcagtattttctccctttgaaggcagaaaaacataactctttaaaaagtaagattattcctcgctttcctttgctgcgagaacaagtatgtcaacttctggctccggcctccatgtcctccactctcggggaggaactaaccccttctttcagcaagaaaatgtgggttattccaacgtgaactgtctcagctgcgctttctccactccaccctgtctgtttctcttcccgtccttcctccatgtctaggctgtattttctgtctctcttctatatcattagcccctccccaaagtaactcttcttcagtgagaacatgcaaaacatgtttggttctcacccacccatccttgagaaagaaagtggggagggaaagaagagctactactcttgcctttccttctcagtaaagcatcttgaagaggtagtgtgtatttgattttttcagcttctttacttcccacaagtgttcctcaagccatttccatctgccttctttccccatcagtccactcatggtgctgcctgttaggttgctttatatcaatacagtaaagaagtaaaaaattaaatatgcactacttttgctttatattgacaccagttgctttatattaacatatccagcagactcttttcactaaattttgctgctgtacctgacacttaactactcacatcttgggagatctcatccaaattaatgcttttaacgatcacctatgtgaaggcaagtcccaaatctggttttttcccctatatccataaggtagctgtttacccataggccgttcaaactcaagatgtcctaaatcaaattcattttcttgccacctcatttctacgtattcctacctctgagtacgtgggagtcatacggaactctgccttatcaccattccttctccctgtcctgtcccatcaactgtaacaccttgtaatgtctgtgcttgaataccaatcacccagcttaagaaataaaattatcttctatttttattgccattagccttcctaaatgtccattgcctcctctccctgtcttagctcctgctgtttctaggttcgtgttctcagcagcactgttgcagaaacttgtccctgcttcggtctttactccacagcttgcagatgagatgattttgcttctgacttaaactttcagggcctcctctgtcacctgtggagtgaagctcaggctcccatgcataacctagaaactctccagattatagtccctgccagccattccagcttcctttctggttgtcctgcaccttgaactttaggctctggcaacatccagccattggtgtgtctccatacttactgtggtgtttcatgcttcaggtctttcttcttgcagttcctttagccagtgaagcccctctctgtttcacctggctaactcctactcatcctccgagactcagcccaggtgtcgctccttctgggcagaccatctaggtgcccagtgctcaagaagaacctgggaatagtgttttacatcttattttaaaatgatttatttcttgctcccagtaaactgtttcttagtgtgttctgaaagacgggcataaccttaaccttttctatttcatcagctcttcatattgaggtactcagtaattttttgttgtgtgacttagagtgcttcatttttttggagagaaatcacaatgtctgtcaaactattgctgtctgtagcatgtttgcattctctggttgtcatcaggtgctcattgaatattgattattgaaatccagttagtatgccagggcaaccagtgtgctgagatatcagtttcccccacccttgggatcaccaaagccatctgctttagtgcccttacaaatactgttttcagtgtgcttttgacctgaaaaaaaggttgataaataactgatttaactgattaccatgtgaaaagaacctggaaagaaaaatctgtgtaacttgagttcttagcagaacttgacaactgactattaattcatcatatttaattctctgtaaaatattcaataggaagaaacaaaatgtcaatataaagacattttaaaaccaaaaagtctgtaatttttaaattttgattattttaagcacgactcttgctcacattgcataattctttccatctgttaagttccttatggaatcagctaagactttaatcaacacctttctcttagcctgcagctgctggatactatatatttgacatctgaaagcccagagtactgtctgatgaaaatctaagtcacagtgaatcacaatgagtgtttgaatgaaacggttttctcataagtattccagcagtgttcatatcagcctcttatgcaagaaccaaaaatgttttagagaatttctcccagtaccctgccttcttttgattaacatttagaacctcccagtctgtggctgaaattttcttaagagttaggtaggatccagaacctgaagatgtgcctactatagatgtatttcatggtaccaagtataaacttgcaagtataaacaattatgtgtacaaaattatgaaagtttgtgtagtgtttttctcttggtgactttaaagcaaagataacttatttttcctatttgttgtgatttttcttcttaggtattcagcagtacaactaaattgactctatagcttctagtattagctgatttagcctagtaacataacagatggtgaaaacagaatgaattttcaatgcaaaccaaccagtttacatggcctattttagcttctcattctttcatcattttgggggtgggggtagaacttacatctctccaacaaatgttgcattgcacaccccttgtatcccaacaggttgtttccaagagggggaaggactacatcctgaagcacattccaaacatgcacaaagatcagtttgcactaacagcttccgaagctcatcttaaatatatcaaagaggctgtccgactggatgacgtcgctgttcattactacagattgtataaggtatgaaacggcaactaagtcttcagcttctgagaaaaaaacatcttctcaataggattgagaaggaaaaccgaaggatttcatttccattaaaacttatttcattttttacatgcttttaaaagagtttcattgaactgctttttgttatcgcacgtcagtcttggaggccatggtgcttttactctggcctggaagcggggtggagtattttttaatggttctaatagtgagatgacaattggctataagatgttaatctgacttttttagtgattatggcattgttatttctctcctccccaaatctgcttttctgctttggggaatagcatttgcaacttctttgataagtaatttttaatattcctcaaagtgaagctatacctgcgttgtatccgtcagttacaagaacattaccacaacaggtaatgtttatggagtcctgtgtttactgggcacactttatatgtgttttttttaatcctcataactttatatgaaaggtactttaatctttattttacagtccaggaaactgaggcttaaagagattaaatgaatcacctaagatcacaaaactaaatggcaaagccaggatttagtcaaggccttcttgataacataggctgtgagcctaaggcactgtattccacacgttcctcactctcggaagttactctcctttgtgtcccgtgtatctctagcctcgtttttcctttctggggcagaggtcacacacccaaataacaactggggccatgctctgcagggaatcactcacagtactctatatcatcttgtcttctcttcccctcctcctcctaacccctttcactattccataagtgccactttgttggcaagaactcctgaatacccacttaagtattcaaaggtgtattctcaaaccaaatggatgaagtggttaagagcactgtaagttgagcctaactgcctaggattgaatctcagtttggcctcttactatgtgacctcaggcaagttacttacttaaccgctctgtacttcagtttccccatagttaaaggggacagcaacatacctgctttttaggattgctgaatactaaaggaattgttggatgaaaaactgcttaaaacagtgcccagcacatgttaagcatgatgttaagttggctgctgttaccattaccattgatagtattatgcttgttatctctactttgccttttgtggtaggattagcatagctagaccattggaaactgggctttagtttggatgtattgctcagtaatcttgttagctggttcagaaaacttaagggaccaactgatgttttttctatctctcttctatgcccaagagatgcattattaatgccccatcttccttgaaaggcataattgagttccataagatctgtttggctaaattcctaaaggactgagttgtaatttttttttagcctgaagagattttatttgtgacacctcaattgacacaagaaaatgcaaataaatgacagttttgataattagtttatattttaaaatgtattagaagtatgaatgatatgttggaaagagtaagagtgtggctttggaatcagatgtcaattagaaaccctatgtcactactcgctatagctgggatcctaggcaactataatcctttgctgtctattaagtggggatgatacaatatgcttcacaaggttgggaggctttggtgagataatgaatctgaaataatgaggtggaatacctggcacattagtgagtgctcaataaccattaattgctttttgccttatttgctggggaagcttgctattttaaagaatcctattaagaaataagaatcttttgttgaagtagatatccccaatttatcttctgtgtaaaacttaattttcaagtttacttaaagtatggcgcttctgaattgcatagaaaatgactcttatctgctaaaaagatttttagtaaaaatgtaacataatgaagtgggggaaaagatattggctgattcacagtttttattctttggagaaattcagcggcagccattaaatctgcttcatttaggagctgctcataaacgggaaataaggtagacaaaggacaagggaacattctggaaaaaaaacccgttttgtgcccctttcccaccaatatataccgtatacttgaaaaccagcatttttatgagcatagccttattttggaaagcaatctgtacatccttgaaagcgaaattgaccaaaactcatataatgatggattagtttctcctcttaaagcttatgctatatgtgtttttcttgatgtaaaaatatactagttggaaagaaacagcctaaatagtagaaataggctgtgtcttatatttataatgccaggtgaggacacatgttttaaaaatatttcatcccatgttcatgggaaagctggcactaagcttaaaaagatctctgcatactcattgtgtttattgggaaatctcataatgaaaatatttacttagtaatttcatttctattttgaactttatacactatatatacttattacagatgagcacttaaaggatgtggctgaattttaaagtgaatttttaattgtggaggtttttttttccccttatgctcattgtagtttattttctacagtttatggtttagctggtagattgtgtatcatattggcaagtgatcattgaacttcttaaaaataagtatttccaaactatctgaatacaccgcttgtacagctttattatcctcatgagagagccttaaatatttggtcacttgcccctaattttggctacagagctggaagatgtgcccagttttaaacatataaagtcttatgcatctcagaatataactattacatttgatttaagattctaacatctgagaaaagagtaattatgagatggaaggtcaaaaaaatcaaacaatgcaaaagcagcaaaaatagccttgttaactggagttgtcaataacaagtatttagaatattgtcagatacaaaagtgtatgtaatatagtgaaaacactaaaactttgaaatctcaggaatttaaaaagtagaatataccattcttgatttaatatgtgcccatggttttcttaattcttgtaggaaactaggtatgtggaaaggcttgagcaaagttattttaagtcaaaaacttttcagtcctgaatttcaatcctgaaatgtttctttggtgctaaattgtccactgtagaaaaaatatataaaaacatttaattttttataaaatcctattcctacaggataaaagggaaattgaagcatcgctgactcttggattgaccatgaggggaatacagatttttcaggttggtaaatgagaattgtgtcaaatgctgtcagccatgtcttctgtttacagcatgcctctgtggtcctgccacaggttcagtagttcatttttggccactggctggtcatcatttcccatttgtctagcacagatgtggatgatgtaggatggatgaagtgactcagcctgattgttgacagtaataagaaataacagaaaacaataagtaataagaaataacagaaaacaataagtcaaagattagcccaggttcatcactaacaggtcactaacagatcattaatatccaaacgtttctgtgtgtcagtgattttaaatattcttttatcctttggagcatttgtaagtggaaagaaaaacaacattttaatattgtgcctgaccagacgttttaatttccgttatactttagtgatgaaacttaccccttaaataagtagaaactgtcaccttttagcaggtgagacagtgttatcctgcagccatcaaaaagggagacagatacctctttcagcaagacacaggaaagtgaaaggatgtcttatctttgatgtaggcaaaatatccagttatgaaagtctgagcgccttattgcatctcttgaatacctgagtcctttggactttttatttaaatttaggcatacaccagaagggaaaagattgccttaaaagggttagttaatacagtcacacaggaaccaaaagccacagaattgttatcatgaatcttttaattattgtctgtatttctccaaagagatgtgggggcttttttcagattttaattactgtattttggttttcagggaaagaagttagagccattttacagtatctatcatttttcccattaactccatatgcatattcttttcacagaatttagatgaagagaaacaattactttatgatttcccctggacaaatgttggaaaattggtgtttgtggtaagtttaaaataactggcttaaaagaaaagtctcattaattgcttacttttttgggtttctgttattttttgttttgtttttaaacaatattgtctcaggcacaaaagctgttatttttaagaagttgacactgaagataatttgctttcttgtattctaatgcatgtgctatagattcgttgtcacacatatcagtagtgaacttaaaatcaaagaatcttacagtaaagactcttatagcaaaagaagttagtaattttaatttatgtttggtccgtagcacatgaccctaagttattctagttgcagaaggtatttcgcgtagaggttagccagttcttttgaaagttacctctcttgagcaaagaataaagaattatataaaaagatgtttctattaatatttgactatttaaaacccattattttaaagagaggtctgcagttcttaacatgaaaaatactcttacaatattgagaatgatacattttcttttgttagagcaacgtcttgatttttcccaagtatttctcttttgccagctatatccgttttttggtagggttcaaagaattatagttaataatgtgtacatttggtcataaaaattcatagttctggccgggcacagtggctcactcctataatcccagccactttgggaggccaaggtgagcagatcacctgaggtcaggagttcgagaccagtctggccaacatggtgaaatcctgtctctactaaaaatacaaaaattagttgggcatagtggtgggcacctgtaatcccagctactcaggaggctgaggcatgggaatctcttgaacccgagaggcgatggttgccatgagccaagaccgcaccattgcactccagcctaggtaacaagagtgcaactccatctcaaaaaaaaaaaaaaaaaatcgtagttctgctttgttcagaaattactgaaaaaaatacatgaggaaaggaagataaggatttgtagacatgggcttctctcctgtaagaaagatggcctatgtaaataaagggccatttctcctgctgggatatatagctccatgaggctatattgcaaatagaatgtgggcattgactccatgctgccctgtaagtcaaaagatgtgtttctgacttcacattactttaattacttgggcacgattcaatctgatttcactttacttatacattacatggggcctaacctgtctcctcctaactggctcttttttgtttcaagctatttgtgaaaggatctgagctgtttgaaaatgagcaaattatgacgcacttgcccctttcatgccccaaattaagttataataaagtacatttatgaaattgagggttttttagggtcctggacttgttgcttgctgaatctgtttgtgtattgcccttatctgaggagtcttctttaaagatacatatttttgggcctcatgctcctcctccaggagatttttgactcagtgggtctggagtagagatgaggaatctattttgacaagtttctcagatgatgcttcttgaagccaactcagctctgcctagctgtatgaccttgagcaagttacataaactctgtgccttggtttcattctaaaatgtagataattaactccctccctagacttgctttgaggattaaatgagtggatacatgcttagtgctcaataaatgtcagttgttactatttcagtattggggtccactggtagttcctttaaaatgagggaaatctcagagatttaaaaaaaaaacacctccaccttatccctgtctgggctatacaagcccatactgctccatacagaccttaaggtgtgtagttagaatatgtctccgttcttgctttacctccactctctggctgagaatcattatatctgaaatactcctttttgtatttcggctgccctattcattattaggaaagttaaaagagttcataatatcccataactgtaagaaactttgtcaaagccttgccctcaacttaggactttatcttagtgatcagatttgaagaatgagactccttatatgtctactgatagctgttcttgttctttcccatctcatacctccaactaccagctctctctatgtttagctagggaagttttccatttcttctaaaccccaaatagatatcctgtattgttcactatataactccttatttatttccaataatttatcataaacttattattttgtgtgtttctttgccatttctcctgctgggatatatagctccatgagggtaggaaccttgtctgtcgtattcactgcctatttttttttcagtgcctagcaaggtgtttggtacattttaagtgttcaataaatattttagaattggtaaataatttagaatcttttagaattggttgccttgttgctgagttagggtgttgggattatatttgatggttcttttatgatggacccttctcttctgcattatacaaataacctgaccagccagagaaaccaaagatattcctcagctgttttggatagtcagtgtttactgacagacccttgtggctagatgctttcctgaatttctggtcatcccctgtcctgtgacatttttgaaaggaaaaacaataatttatcccacaaggaattttaaatgaaactttatacatttcagaatctataattttccttactaaataggaaacaaaggggactttggcaaatcagagatttttcttcctgaatttgattcatggtttccttccaaagggtaagaaatttgagattttgccagatggcttgccttcagcccggaagctcatatactacacggggtgccccatgcgctccagacacctcctgcaacttctgagcaacagccaccgcctctatatgaatctgcagcctgtcctgcgccatatccggaagctggaggaaaacgaaggtattgcagggtctggggtgtggaagcaaattgtacctttgccacctgtggcctcttactctgaatgggggttttgagctcctacagaattggattttgggactgggacactccagattgagagcagcattactatttacatctcagtatttccagaaggcaaagggttaggcttgagccccacctactgtagcacttattcagaatatctgaggtgactgcatttagctatctctcaagtacagtctctaaggttttcccatgcctgacttgaaaatacttgcaaaaagccacccataaaggcacagggcaagggtttatctgcaactcagattttatctgcattttagagctttgtatttacactgacccaccttagtgctattatccacaggtggtctggaattctttccaatgtgattatttcttagggttagagtgacaataaaggtaggtcacagatgtgtctgcagcctctgattgacggctgggaggcccccaagtctgttctagcaagagtgccaaacaaaggagagggaagtcagctggtcctgtggggcctttgctgagatgcagatgaaataaagcagtctgtctggggcctcagagtactggaccctgaaacggggatcatgtcagggtgggaaagaaggcagtgctaagggtctgtaacatccgacttcaactttacattaatctgatagccctttatcttgagttgtggcaccctggatttcctccatttaacacaccccaaccctaatcctcaaaactgctacattacgtatttgggtttgtttttttttttaatgctttggggttttgtttatgctttcaaagatttgttttgcaaaaattagttttataaattcatgttgtagtaatatctaacagtaatttgattagattggatttggtgtatttgtgtgaatatcagggtgaagattcatattttaggttcatgtctgagacaagttttgacacctcagacctcatctttcctttagaaaccaggcaaatacccatcctttcttaaacaaacaaaagaccttgtagaggtttgtgcttctgatagatttctctcaaaaattctctgtcaatccaaatgagacccggtttggcaattcttttgtaatttcgtagcgattagaacatgaatcattcctcactgtctgccacaaactgcctgtgtcttcagagagaattggtataactgtcaggtgtattggcttcagctgctgctagactgccacttcttccccacgatgactcatcagtgtaacaaatatatctctcctatgctgacatgaatatgaaaaggaattcagatggggacaggaggaggatgaagaagcaggagaacctgtgagaataggtgacataattaggtgcagagcccataatttgccaagtcagcttcattcctaaacgtctaacatggcaccttgagaagttgatttgttctatcagctttctgcctgcagcattttagtacattttttttgttcagatgaccttaagagatcccttcagagccttaaagaattaatgaccttcctctataggttctaaggtaaaaattgcaaagaattttgagttttcagagagacagggcgttgttcattgccaaccatagtaccaagtgtattcggaggcttaagtgagtaggtgtctttgtttgttttgtgctgctgtaacaaaagaccacagactaggtaagttctaaagaacagaactttatttcctcacagttctagaggctgggaagtccgggattgaggggccagcatctaccaagggccttcttgttacttcatcccatgatggaaggtggaagggtaaagagagggtgagaaagagtaaaagggggccaaactccgcctctcataatgaacccactactgcaataatggcactaacccattcatgaaagcagagctctcatgatctaatcatctctttaaactcccatgtcttactactatgatatttgatatcatatgatttatgatagcaattagatttcaacctgagtttaggagggaacagacattcaaaccatagcagtagaggaatgaagaaatgacacatgcttagtttcttctacttaggggttttccaggtctgaaaaaggcctgaaattaagtttctctgggtcaactttggcctgaatccaagatctcacccccatttaagggctttatcattttaacatgaaaagcccttttttgggcattagtttagcaaaaaacagcataaaaagagtctgtgtttttcttaattttatgtagagtcaccttgtctaaaacactattttagcattttagtagaaaatgatcacaaggatttttccatagggtttagaagagaaacaaaaacatgccttgcgtcatttaaaaaaatgttaaagcctaactttattcaacagctggagcttattcctaggataagtattcacatttactgcattattttccaaagtagcgtatgaaaaacctcattgtctctgggcttttacaacagagggagtaaaaagagcacaggcatgttgatgatctgcactgttgacaccagtgattattagggggatgagaggttgcattttacatttcttagaaaacatttcagaattatttaatgtttctctcagtttgtaactgaacggtgtgaagcttcctaaatgtctggaaagggtctggtacagcactagggagggaagagaagccagccatgtggaacacccaggccatgctaacatgttgacaggaataggtagaaaacaggctggcaagtacttgtcttctcgtgagcatactagtgaatatagaggaactatagtgatctctgaacctatcaggaagttgagagtaaaaaggctatatgtaaagatacagaaaagcttttaaattattaggtccacagttcctaattattttagaacaatggaactccaacaacttagagacttttacttttttctcttcacttgccactcatccaagggccacatggctattgctgtgaaaccacagtgaataaaaactacagtaatttttgcaaactgctttagctgtccaccttcatctcacacctgctgattcagaagatggggattgttaggccccagtctgctccctgacaagttgtacatggatgcatttttgttgtgatgatatgtgcgtggagctctggtgtctggtttcagcctgctttctctgtagcaacacatactcacctttgtgtttcagccagttccttagaacaatgtgaataggctggaacctggaaatgtgcacatagccttctccaagcattttttttttgcattttgcatcctagaaggcgcatcttttctttctcctcctgctcattttctctctagggaccctgtgatgattatacttccgagctggattcagacatcaggcatgcaagtattttcacttaaccaagaaacaagacaattaaaatccattaacaggcccctgagaacccaattagtctactagtttctaaaatcagatcaacttcacattccccaaatgcactctccatttttaacattgttttattgtattatttctcaccagtattaaaaaggcaaggaatctaaacttcttccttgttttacatttctgacctgaaagacaagaataatatttttgtgtcagttgagttgtaactggcagctgggttgtaactttgtgccttaatggaatggttagtttatatgtaataaaagagactttgcagtgttgtgtgtttgactgcgttaaagaacagcactgacatgtgaaatcaaagaacagctttaccagtcagagttggaaatcatcaaaccagtagtgattactggtattttctaagtagatgataaagcctcactaattcagcctaagtggagaaaatcaatcttatattaatgaaaatccaaattttagaatattcacaagaaattctcagaagaatagttttattttaaattgtattcagcagctagagctaagctaacagtggaacaaattgaacaaatgaacaaataaaatgaatggcaattagcataattgtatttattaagtagtcttctagagcagtgcttctgaaattatctgcagaaaagggccagatttttaaaatatttaatatgctatggatactttcgcaaaatacaaaatcacattggtggctgtcatggcaatgtcacatagctctggaagtttctaaatgttcatatcactcactgaatttatttcactatggaccaataaatttgcagacaagaagtggtctgtaactgcactttaaataccactcttcttatactgcttgaagctttcaaaaaactaagtagtttaaatatccccctcaaatctgttgcactggtttttattcatttttcagtcttctgaagtcaaattcctatctaaattattactactttccaatcactagattctgaatttgaagttatccttgttcttggcctgatgagtcacttaagctcaccagccgttccttctgtcttggttaatgaactgtgttccccaccacgtagagaagaagcagtaccgggaatcttacatcagtgacaacctggacctcgacatggaccagctggaaaaacggtcgcgggccagcgggagcagtgcgggcagcatgaaacacaagcgcctgtcccgtcattccaccgccagccacagcagttcccacacctcgggcattgaggcagacaccaagccccgggacacggggccagaagacagctactccagcagtgccatccaccgcaagctgaaaacctgcagctcaatgaccagtcatggcagctcccacacctcaggggtggagagtggcggcaaagaccggctggaagaggacttacaggacgatggtaacagtactgtcccctcactggctctctgtttagtctcccagttttttcaagcattggttctatagaactggtgtctggagagcaactttaggcagtagtaataaagtggaagaggtgtcttgttgtcttccccaatgacttggttgagttgcttgtgtttggctgtgaacaaaacatccctctagttgtgatcctttgcggccacaagactggatggttgtagactcagtcttagctgtttctatgaagtagattggaaattagtcctgctgcccttgtgtctgtatttctgcttcccagattaaataaaacagtggttaggacagcacagtggagtgcagtaatagtgacagaaacatcttgaacttctggacccctccccacaaagtaaagattggagtccatgccattgagttacttagtaatgtttttctgaagcgcctcccatgtaaccagaactatagggaggataaaagaaatatagcacctggttgataggaacttactgcatgttaaggagataagatgaatcctatggcttatcttagccaaacttaacatttgtgtccctcttttatattatttttctgtctcaaataagtgctgtagcattcaggcttgacggaaaagatagactttgttaaagaaaagtgcagaccatctttttggtttctgtagaatttgtgtggctctcaagtcactcagtgcccttcagaataggcagctatggacatggggggctttgtgaactgtcatctgcctgtgtcagtgagccttgctttggcatcaggcaaagggcccatcagtttcggtttgtcctttgtcattgcagcaaggtggtatagtttttcttcttaaaaaatacagaataatgggcaaattatagtattaaaacacatataggtaatgcagcaatccgataagaaagaacaagtaggccaggcatggtggctcacacttgtaatcctggcactttgggaggccaaggcaggcggatcacgaggtcaagagatcaaggccattctggccaacatgatgaaacctcatctctgctaaaaatacaaaaattggatgggcgtagtggcgcgcgtcttcagtcccagctactcgggaggctgaggcaggagaatcgcttgaacccaggaggcggaggttgcagtgagcggagatcacaccactccagcctggtgacagagtgagacttcgtctcaaaaagaaagaaattgagaaagaaagagagggagggagggagggaaggaaggaaggaaggaacaagtagtacctgttgaaaatggtcccaggaaggaaggaaggaaggaaggaagggagggaggaagggagggaggaaggaagggaggaaggaaggagggaaggagggaaggagtaaacaagtagtacctgttgaaaatggtccctggagtttcctattggagtctcattagcaaatttattttcaaataggaataattacatagccaccctcaaaatatggttgcatattatgatggtcatttccctttttgtcattaactatcttttccttcttctgtgtcagaaatagagatgttggttgatgacccccgggatctggagcagatgaatgaagagtctctggaagtcagcccagacatgtgcatctacatcacagaggacatgctcatgtcgcggaagctgaatggacactctggtgagctcttacgggaagttattcttccttggtagcaggttatccaggactgaaaaacacatgcctcagaaaatagaaggggtgagctgggggccctagaccagagactggactgcactaagagtctcttcaggtcagtgttgtaaactgcaggatcctgtgccttctgtggaaggcagggaagaggagaaacacccaggactgggaattagcattttgtgctccatgctttggacaaaaggtagttgaacagtagggttctctttatgttatgctgtgtcgagaatcatataatgtatctggaaggccttgtagaccccttcagtctggcctcctttttacagataagttaacctatagttcaaagaggacaaatccaacatggctagaaacagaagtaggcctccaggtttttggggtttttttgttttttgtttttcccactgtgttatactggtagaggagtctgggaggaaaagtgtcaaaatgggttgacctaaaaagacactcttaaattccatattcgtatgaattcctgtagaaaacatgcattccctatagttatataatacatcatatatatttctgttacatgtaagatactatctttaaaaaacggcagcagtatcagttttgtttatagacatcagtcagatctaactgcttttgtcacacatcatgaatcagtctgttctttagagaaatatgcctcaggaaccagcactattgaaatggccccttccagctttgattgaatgaagggcctgactgaggtagcctgtccctgctctggcaaatccacagctcctgatgttcatcgagcctcctcctccaggtgccaggcactggaaatcagagaggaaccagaccgatacacagtcactaccatcctggcacttagtcttcaagagcaggaggcatcttttatttcagaattctgttcgctaacccaacagaaccctggcttcccagacctgcctgtagctgcagggaatcatctctctgaccaacactgactcattaggctgcttaccctaaacatgcttagagttcatataccaaactttgcccctttttgcccatgtactttatgatattgaattttctcctataattacattttaatttaaattcacaattatatgcacattataggtccatgtatatagctctgtgtgtttatgcttgtggaaaggaaatggtctaaaaactgtgtatgccgcagtgcctttgggaagggaggtatgagggaagctgacctggactttgcgtttatatatttctgcatttaatttttataagactgttaattttaaatagaaataaaatttaagtaaaaagcctggctgtttaagaagatttatatataaaaaaagtttgttgaaatgttataaaaataattaaagaatgagtggtaaggccaggtgtggtggctcacacgtataatcccagcactttgggaggccaaggtgggtggatcacctgaggtcaggagttggagatcagcctggccaacgtggtgaaaccccatctctactaaaatgcaaaaaaaaaaaattagctgcaggcctgtaatcccagctacatgggtggctggggcaggagaatcgcttgaacccaggaggcagaggttgcagtgacccaagattgtgtcactgtactccatcctgggcaaaagagtgagactctgtcaaaaaaaaaaaaaagaaaaagaacaagtggttaaattataccttattcatacaatggtatataaccattaaattcgagattttcaaacaatatttaataacataagaaggatagttaaggtaaatagtaaaaattatataaaatgtcatctaattaaaaacaagaatatttatttgtgtattttaaaaacgtaaaactattaatagccttttatttggatgttagggttatagatatagatgattttattttctttcttacatcatcttagttttctaaattctctattaatttgagcatttaaacgttgcttataaaacattcagctaagtactcgccttggcagcacatacactaaagttgcagtgatacagagaagattagcatggcccctgggcaaggatgacatgcaaatttgtgaagtgttccatatctttaaaaaaaaaaaaaacactcagctaagattgagtagtgatgaagtataccacactgtctttcattcttacagagtttgataggagttggttaagtgttttgagcatcagctcggtgttgacttttccagtggtgggtctgagtttggagaatactctttacaggcatgatagctgagggcacatttaccaggaaatcgaaaaggaaccatgacaacttgtttaaaggtttaatgctctttagaagataaagatcgttctagatcctctactaaagccatttgtactaactcctaaaacatgagtatcccctgagtttttaaagtgtctacttgtaaaccagtaatgtcttcatatttcatgtttcaattgaactaattattgaatacttaatatgtttatggcatatgctagacactgagtcattatgagatgtttctaaagagttaagggatagaacacaagtcattctgtagactactagcagtagttgaataagaatcacattacttaaagggttttttgttttttttttttaagaagccatttggccttatggatctagggcttgacctgtagtacacttgcttcatccattggcaagaaaaatttcagcggtgttcacttacacctctagttcttattggtaattttaccttctgagacatgtttctactcagtgcttcactcatatgccagtcacatagggaaatgtcagccctggatttctgcttctgaaattttggcgggtttccaccgagtgctaaagtgcttaggttaggtgctctgttgttctcaaagacccagtactgaattttcactgtggcctcccagtttgtctcctcccagggggatctgctgcaggaggtatgtgccaagtgtcccatcacccaaaaagagctgctgtgaactgagtgtatccatgtatagtccctgtacctcacccttttatgcattcactgtgtaattattaaaactagcaggcaggtgctgttattggcccgattttatacgagaaggagactgagacactgggaggctaagtaactggccaggacacatggctaattagttatctgggccaggatccagccagatctatctgacttcagaggccagagcccccacaattcaccactatacatccaagccgaaccaaatctagaaggcatgtgttcagtaagggttaagtttaatgttgctgctgaatagaaaggggaagaggggaagctttatgagatgcagtaaagaggctgctttatacctatagtctttgcttcttttctataacttcatcataaatagcttaattagaagtttgttttagaaaattcagactaaacatcttcttacactctaaccctactttgactcattaacctctatttactgtaagatgagagagagtgtgtgtgctgttctggttgtctgccaccaaagagtcacagtgaaactttttggtaatggttaatatttgatttttcattcctgatagcaatatgtcagaatatatggcaagaggtgtgaataatttgaagtatttattgtttttatctctgtgttttatttcagggttgattgtgaaagaaattgggtcttccacctcgagctcttcagaaacagttgttaagcttcgtggccagagtactgattctcttccacaggtattaaaggaattgaaaaatatcagttaggaaactgaagttatagaaaattttaagtagtaacttacatttatacaaatgagcaaaaattaaaaaccctaaggaaatgatccttcctagatacgtacattctagctttattctgaatttatttccatcttatttgctagttctgcttatctttgagttgatttttacttagataagttatagattttgcttcacattttatatggttgggaagcctctgttcttcaggcttcaggcgaaccacgtgtgcacatgcatgtgtctgtgtgtgttgcttgtcctcaacctgggagaataatattttttgtcagtgtgttctggcagaaatgtttccacactctggttattccattcagattgaattttcaaagtatgctgagcctagagcatttgacaacctgtgatcattggttaaactattaaatgtccagcaatatagataaaatactctgaaactcatggtttcagcatttggatgtaatgtatgactaatggccctaattcctgagcacttcctccctcctcctgcctttctttcttgggctctctttgtgtcttgtttttttcccttctgtgtgtgtttctcttttttcatttgcattctggctctccttgtccctacttttctcttcctctttcctcccttttttctcatttgtcttttctttctcttacttgcgttgaagtaaccataatgtgaaaatgatgtttatgaaatattttcctgaaaactgcaatgagtaatctactcttaagagatgtttctggggcacagctgatagtcagattccacacctacactatggggagaactttgtgtgccttccttgagagtttgtggggatgaccaaatgattctatgtgtgaaatcctgttggagtctgggaagacagcatcagcacaagggatcactcggatgtgacacttcctagtaaaacatgcttctggaacttttgcctctagcaaaaattgtatcttattctaacagggttgtcctttgtggtgggaagcagcaaaatttaaagatataatacctggtttccttaaataacccattgcatatcttccattcatataattatcagaatcatttttaacctatttctaataccacctcttgggataataaaaaaaagtctgccccctgctgtgtacagcatttggcggaacccccccacccccgactcgtgttcgggaacttagtcctggtgcctgcctcccagcctcttcaacaccaagaacaccctatatcctacccagcaccaagaacactttatattcaacccaagaattctggccttttaaagagaaaaactgtgtttcttggtaataattggtttattttcctatttcttaataaaataataacagaccttggcctaaaaggtctgaattgccatatcctactgaaaaaaaaaaaggaagccatgtctttacctatatgaccttatttcaagataattacttgatttctgaaatgctagggatagttggattcctgttgtatttgcacctctgtgctttggattatttgtaaaatgaggagaatgatagtgcctgcttcctaggactgttaggaagattaaatgagttaatgcatgccgagtatttaggtcagggcctggcacatagtaattgctcggtaaatgttagctgctattattactgatggaggtggtgttgatgatatatttccccatacagcccagaaaccacagattggaaaccactttctaacatgtaaggattacttaaccttttgtggttctgtagcatctctctttacaaggcaaatattctaacctttcactttaaagttgtttcatccttcccttatcttgcagactatatgtcggaaaccaaagacctccactgatcgacacagcttgagcctcgatgacatcagactttaccagaaagacttcctgcgcattgcaggtctgtgtcaggacactgctcagagttacacctttggatgtggccatgaactggatgaggaaggcctctattgcaacagttgcttggcccagcagtgcatcaacatccaagatgcttttccagtcaaaagaaccagcaaatacttttctctggatctcactcatgatgaagttccagagtttgttgtgtaaagtccgtctgtgtgcagctgtacaggcagcttactgtttgctagaggatgcgaaagtcataagttctttacatattacttgtgccatatcttcttcaccctaaacatagctctttctttataatatttgtgatgatggaaacaaaagccttggaacaattgcactttaagtattacacagaagtaaaagaactacagaaaatgtacagcaagacaagtgcccggaagttcactgatccttcagaaggaaatgcgctttactgattgcaaagccttcagaatattggagtgtggtgtgtttgctcatctgatgctttttagttcagttacatgtaacatcacatttttttatcacgtgaaagatgttagatttgtttgcttataaattttttaccactcccacataaaatgctcatagtttgggagaggaaagagggaagattctctcttcttttaacagagagatgattgctctgtatacccattgcttcctccctgaggctgtcccaaagtgaacactgatggagtggtcaaaatcataaggttgtagcaagccaaagatacgtatgtgacagaagcacataagcaataagcagaaaaccagaagtgcatgctgtgatgcctgtgactccttcatcccgctcagtgccatgtcctcttttgtgatcttccagaaagctccaggattcatttgagttccacatccaagtaacagatgaattatattcatgttgtaatgcattttgtggagtttacaaaaccagtgtctgttaaaactttggaaaatgtcttagaaaacgttggtgcttggtgatgctttatttgtttaattatcaagaacaaattatggcaatgctagtttctgcttaaccaaaatactctgtgtatatattatacatatataaatacatgggattgtgtatgtctatatgtgtttaaagcttactatgtcttcattttggcttccatgactatcttttatacatggaattccttaagattgagaatatgtcactgagtgaatgatacctgcagacagtcagttgatatatgtagagttcagaatgactgttttctcatgtgcctttggccatgattctcaacactgattgtataacagaattttggggggagcttttaaaaaataatgactgagtctcccaccagaccgattacatcattctcttgtggcgggacccaagtagaattgccttttcttttaaagttctccagatggagctaatatgcaacaaagttgaaaaccactgatcctgggggtgtcttgttaattttgaagtaaaagtgtacagaagacgtagtgtatgagaaagggccatttttaagacagttacctgttgtgctgctgttacaatatataatgaaaccaagtcaggggagtgaatttatcaatcttttgatgtaaagtaaaaacgtagttcacacttcaggagagaacttcatagcacaatgtctttctataagatatttttaatgatttagtattttacaacatttgtttaccatattttgatataccatttttttctatctgcccagttttattaaaaaaactatatattattttctaaagaaacaatcatatttttatacaaaattatgttttcaggtaacgaaatagatgtagggtacagtggaacataagcagtgttacccctggctgggagtcagtattatacaacaaatggtgagctggaacatgccctgtctgtgctgtccctcctgtgctgggtcgcggatgtgtaggcaacattgccttatcacgctaggttcacctgacactttaaaaggaaaaaaagttccatagagttctgtggtcacaaaattgttttgcttttatcaaatactttaatagaaccaaagttgcagatattggaatgtatggaagtatctcagtctctgcataagaggattaaagtatgaaaggatcatttaatgactgttttacttataagtcattaagtaatccaccatttcttatggatgatgcttaagcctggtgaggtttgtactctaaggagcccagatcataatgcagtgcatttccttagcccttagagtttcttgcaaacatttaaaaaaagacatatttaagaaagaaagataaagaaaaaacatatttaattactgtaaacaggtactgctttatgtttattttctctctacttcaaccaaaatcagatctttgaggttttgctgacattgttggtggttttgcacatgttctttctaattggatttatgaatagttctatgggttttcaaagatgaatcatgctaagaacacttctgctttttgatccactgtttgcagcagaattatatatatgtataggaaaaatccactttgaataatccatgttttgtatttggaaattgtttttaaaaataaaaaggaaaggaaatatataaagctgttatttattctgcatttcttacatatctatcgcttgtcagtatacccgttttggtatatattgcctctgcacatctacatttgtatatgcaacagtgagctttatatctacataaactgtaaataatcctttctgtgaaaggatcatcatatcaagatgataccaaaagtatgtaaaaagaaacctgcattattttgtaattatttcttatagatatttcatggtaagattagcagtcaataaagttacttttttgcctttaaattgcctttttgattattagagctctcaagcgagaagcattaaggagtgacagtgttttcttcatgttctttgctgtaatggagcacagtaaaggacaacaaggttccatgtgatagaattccaagtaaaacagtcctggtggtgacgatggtaataactgatgctgagtactaccatgtgccagacccagtttcacatgtattcagatttcatgtgttcagtcatttaatcctcatatccccagaaggcaggtactattattattcttagttgcagatgtgaaggaatcaagcttccaggagtttgtggtagtcagccactgttgagttcaaattatggagctgaaaaaaactctcctttaaaaggaaatattttaaccaaaataagtaacttaaacctgaaaaccgtcatcattggactgttggtttaattataaaataaacaaatggttgcatttaaaagcatgcattcacaaagctgaacgtgagggcagcatggcattaaggaaagagcccagagttgagagtcaacagcattccgaaaagccccagctctttttctgaagggaaatccattaccttctctttgcgccacttctcttggccaaaaaatggagttaataatttaaaggactgtttggagaattagataaggtaatggttgagtatgcccctgatgactaggtgggaaaaggagggctgtcaaatctgacatttaacttttgtgaaacagagccatttggattcacacggtccaaaacaagttttctagtcaagtgttacgaattttgcagtgtctgataaattgtgatttggagtccaggaaagaaaatacttggtacctactatgcatctaatagtacaaacaccgtgtctaatcctcacaacccttcaaggagttgtctgtcactcgcatttcacagctgaggaaacagttaaacttgcccacgactctacagctagtgagtggtaaagcagagttttaaacccaaacttttctccaaaagccttgctttttttttttatactgtatacagttgttacccactgcccttaaagaaagatcagagcctaatagggaagacagactccaattttgatagcggataaatgaaatttatttgctaacttcgtaatttttttgagcatctactgtgtgccagactatatagagggcttatataggcattgctttggccaagaggcagtaaagacctgggaggtggggaatgggaggcaggaagatcagagaagcttttactggaaaggcaattttatttgcatggggacttctggcaggatggagtaaggggcaaactatccaggcaaaagcttagaaggtggagataacagtggtcagtcaagggacctgcaagaacctcaaggggccttttggcttgagtaatcatgctccaatctagccatgaaagccttggacgcccaaatgaggacactgagttttttctggacagaacggagctataaaaggaagagacgtgtgtttggggcttgagagaaataatgagagccatgctaacaaaaggtggggagacagttggaaggtgatgagggtctgaactgagggtgttgtagcaaagaaaaaaggaaaacattcaaaagcagaaccaagggactgtgttacacacaaacagaaggttgtcatctcctaaactaaatacaaccagagaagtaggcaatcttcccttacttggcaaagtccttgggaagactagagttaagtactactttataatatgaattaaaatccactcgataaatttgttgagtgttaaaaattggcacaatggctacaactgctctagtctatggcagtggttctcaaacctgactgcatgttagaatgacctagagagtttaaaacagtatagtctgggtcccagcccaaagcttctgatatatttggtctcagggtagttccacaagtgatgctaatgtgcatcagggttgcaacccatgggtctataacatgagcccgagccatatagaccaggcaggctatctgctcctgaactggtatgatctacagttaggatggatcgggtctccagagtgtctgggtatattgcattttgttagaatgacgttttcttttgccaataaagctgtcagagagtggaccagtgtttgagtggggcagtcaactcaccatttcagaaagtctgaatacacccacattctagagatcagggtgttacatatgactggctaagtatgagggtggggataatgtgagtacggtaaaatatttaaaaatctcctccctatcattcttgtatttgccttgtcatttctctagtgctttatacaagctgatccccacacagaggaataatgaaaataagtaagctaaattccacccagcccttaggttctgaagacatgtattttgaattaatggagaagtctgacctctgagaagtcctgctcagatgctatgagccattgtaggggataaagttatatattctcaagagactaattgaaggtctatgaacatggcacagctataattaaccaactcattacttaggatgggtgtttacccatctggtgtcaactgtagtcagctgagggatcctcaatttattactgtcattactgcaagatggatttcataagaacagatagttcccaacttaggaaggaagactcagttccaaatttgcttctaaattggttgtttgacatttagaacacacgtccccagcctccctaactagctcataaatgcctgttcaacacagagatattattagagatgacttttttttctgtgtattagtaatcatctgtcaaagaggcaggcccacaacataaataaggtaggtggagtgaccccacaaccagatagagatgatataccccctgtagaccagtagttcaatcttccggttttacttctcatagtacattcatgccctactatggataacagtagaagaaagcttcaggcaagccatgccaagatgaagcagctcttagccagttttcccttggagttccatgagggatgcatccactgttttctcatccacaccctctagtccagagctgctcaggctgctctgccatcatgaaagagtaggctagaacaggcccttttctcctgacctgcagaggtggaagaggataggtctaggagctactctaaggagcagaggccccagggtcttctttagactctactgctgaattgctagagtaggaataacaggctttaagagagaaggtaacgagcctgtattggggcctttaaatgcaacatcaataggaatgtgtaagaccataaagtccatgggaggatttcaaagaagactgaaacaaattgatataccctattcctaaaaggaaagaatgatataagtgtcaagttttcccatcaattccaatcaaaatcccaaataaaacatttcagccatgacggaaagatgggtattacttttaccctcccaccttaaataattaaaaatagaaaaaatatgaataaaaaatgttttttagacatttgacaataggtagagcagtagagtagcccccagagaaggaaactaaacaaggtgagcatgatcaatgcctcatctgacagcctgagtgttcccaggccacagcacagacaggaggaaattaaatggatcccagaagtctccctgaattgagaaggcagagttgagaatttaggtaggccaaggtggccagagttcacagggcagagtaccagagaaagagctgtgcagagtgaaggggaaggccatgaagatccgcagaaggttcccctccagccttcagctcagtgctgatctgcaagtacctgtgaggaaagcaccgaggcagggagtgagccaggagaaaagaacaaaaccatccctggagctcatgtaaggccaagaacagtttcagtccccaccaagtagaatgaaaaagccttgtaatacatgggacacctcataaaggactcaagggtgttgctccggtcctgcctaacaaagcttaaaaagcaaccagcctttttaaatattgaaagaaaaatgctatccacttagaattttatacctagcaaaaatctctttcaaaaacaaagatgaaataaaacctttctcacgcatacaaaagctgaaagaattcaacaccagagctgcacaaggaatgttaatggaagtcttttaggccaagaaaaaaaaaaaaaagccagattaaaaaaactacatctacacaaagaatgaagagccccagaaatggtaacttgtgggcaaatacaaaagttttaaaaaatattttaaatctctttacaaaataatcaactatttaaagcaaaaataaaaacaatgcattgtggggtttgtgacatatgtaaaaagtaaaatgtctcaccacaatagcagaaagaaaaaaatgaaagtatactgttgtaggtttcttatgctatatttgaaatggtataatattacttaaagatggactatgatagtttaaagatgtatactataaactctagaacaaccactagaaataaagcaaagaggcagccaggcacggtggctcacacctgtaatcccagcactttgggaggctcaggcgggaggatcacgaggtcaggagatcaagaccatcctggctaacatgatgaaaccccgtctctactaaaaatacaaaaaaaaaaaaaaaaaaaattagccgggcgtggtggcggacacctgtagtcccagctactcaggaggctgaggcaggagaatggcgtgatccccggaagcggagcttgcagtgagccaagattgtgccactgcactccagcctgggcgacagagcgagactccatctcaaaaataaataaataaataaataaataaataaataaataaatgaaacaaagaggcataagtgataaagtagaataagaaaataataaactgaaaagaaggcacacaaaaagggaaaaagggtcgaaaacaaatagggcaagtaaaaaaatagaaaactggtacattcaaacccagccataccaataatcaaactaaatgtaaaattgaccccaaagacattacaaggactagccaagaatattttgaaatatagacccaatgaggaggtatttacctttccagatgcaaacacactatagggctcctgttattaacgatactaacacaacaatagccatttagggcaaggactggcaaagttttcccataaaggaccaaagagtaaatattttggactttgccatcataccgtctctgttgcaactactttaacactgccactgcagcctgaaagcagccatcgtcaatatgtaaacaaatgagcatggctgtgttccaataaaactttatttacaaaaaacaggcagcaggctggatttagctcacaggctgtggtttgccaatccctgatttagagcaatgtaacagacaaagaatccaggaacagacgaatctacaaatgggaactgagtatataaaacacacagcatttcaaatcatagagggaaagatggattatgcaatagttaatgctgaaaaaattagctttcttttgaaaaataaaattaaatctcagtcttttaccttacacaaaaataaatagctaaatacttaaaaattaaaactatcaaagtattagagggcaatagagaaagtttagggcggggaaacttccctaaaatccacacattactcccaagtcacacaaaaaatttgataaatttgaaatcaaaaaaaggctgaaaaactctttataccattacctgaagataggtgacatggggaaaatatctacaacttttacaaatacaaataattgggtctatagcatattaagagattctgcaaactcccaaacaacacagtagaaatattagagggatctatgcatgggcaattcacagaggaaaaattttaaaacagcttataaatgtgggaaaagctgttcaaccttaccagtaacaagttaaccaaacattaatatactgatttttttgtctatcaaactgacaagttaaaatgattgataatatctagtgtttgtaagagtgtgaagaaatagataccttcataattttttatcatagtgtaaattaatactgcatttttgtaggacgatttggtagtttctaccaaaattttgaataaaattaccttgcaactcaacgatttgatttctaaatatttatcctatagaaataaacataaaaatttaagagtattgatttgaaaagagaaacatgttatacaatctaggtgtcaaataaatattggcacaatcttattatggagttaaaaataataaaggagttaaaaataataaatggttcagatgcacagacattaaaatatcttcagcatttgttatgtacaaaaagaaagacaagatgcagttcactagtgtagtatgaaaaaacagaagatacataattatatgtgtatgtttaaatgtaagtgcctgaaaaatgaccttgaaagacatcccactaactaaaccattggtaactctgaagaagggagtattaaagaaaagaggggaaagggaatttgcctttaaaaaaaaaaaaaaagaaaaagcagaactccatcttctcaggaaaaaaaaaaagcagagattatgcagaaagtaaaaaaacttttggagaaaacaacctcataataatattgtcagagagatagaaaatattgcactcagaaaattggagaggattgctatacagatagagagaattatgagctcttcaaaatataatagccagaataaatgttccagtggtagaactggaagataaaggaaatctctcagaaagcagaacaaaaagacaacgagatggacaacagaaaggataggaaatgagagattcccaacatctagggggcaaatgttacatacatgcctacatagagacagggaggcagcttatgtacacagaaaaaaatagaggaaaaaatcttacaaggaaattcctcagaactgaaagccatgcatttgcaaaccggaaaaacaaacaaacaaaaacaatgcaagcaacgcctagaaaatgaggaataaagaccaatccaggacacaacatcatacaatgttaaatactaaagataaagaaaagaccataaaaccttccacagactttttagaaaaagagagaggttttacagttctttgacgaaagtgggaaaagttgctgatgcctacgtagaataactgagcaagcaaaaagaggaggttattaactccgagaacaaaatgttgaagaaaaacatataatcatagtataatacatgggttaacaatgaacaagacttgtacaatcgtaatgtaaacactattataatgtcaatatattaaaagttacattataactttaaaagttacaagttaaacaaattaaaagttacaaatataacataaatatgggaaaagaagggaaaatctatgtggatagtctgagaagagtaaatgtgtgtaaaagtgctatattgtcattttccacagtaggaagttgataatgtcccaaattgaaaaagcataaagaaacagtacacaaatatgactattacttagaaatatagaggttaatgcgtttctgctaaaaacacttcaagagttgaaagtgttactgttcggggaaagaaggaagagaaaactgctttttttgttgtttgtttgaggctttgtattatatttaacttttaa

SEQ ID NO: 3156 - DNA, 2458 bp, Homo sapiens
gaccagagagcccaacgcctggtgctcaagactttctccgagtgccacatgcttgttggagagagagaaggcaagatcagggctaccaactgtagctgtgcaggttttgccatgcaagctatgaaacccacgtagtcgaacaccgtgatgcttctcctgcagggcgtgtgatgaggaggcgagcttggctttggagtgctgggaacctgaggaattgccaaggacccagagcccagccctgaccaccagagtgcccaaaacacaatgaacaaattgaattttcataacaacagagtcatgcaagaccgccgcagtgtgtgcattttccttcccaacgatgaatctctgaacatcatcataaatgttaagattctgtgtcaccagttgctggtccaggtttgtgacctgctcaggctaaaggactgccacctctttggactcagtgttatacaaaataatgaacatgtgtatatggagttgtcacaaaagctttacaaatattgtccaaaagaatggaagaaagaggccagcaaggtacgacaatacgaagtcacttggggtatcgaccaatttgggcctcctatgatcatccacttccgtgtgcagtactatgtggaaaatggcagattgatcagtgacagagcagcaagatactattattactggcacctgagaaaacaagttcttcattctcagtgtgtgctccgagaggaggcctacttcctgctggcagcctttgccctgcaggctgatcttgggaacttcaaaaggaataagcactatggaaaatacttcgagccagaggcttacttcccatcttgggttgtttccaagagggggaaggactacatcctgaagcacattccaaacatgcacaaagatcagtttgcactaacagcttccgaagctcatcttaaatatatcaaagaggctgtccgactggatgacgtcgctgttcattactacagattgtataaggataaaagggaaattgaagcatcgctgactcttggattgaccatgaggggaatacagatttttcagaatttagatgaagagaaacaattactttatgatttcccctggacaaatgttggaaaattggtgtttgtgggtaagaaatttgagattttgccagatggcttgccttcagcccggaagctcatatactacacggggtgccccatgcgctccagacacctcctgcaacttctgagcaacagccaccgcctctatatgaatctgcagcctgtcctgcgccatatccggaagctggaggaaaacgaagagaagaagcagtaccgggaatcttacatcagtgacaacctggacctcgacatggaccagctggaaaaacggtcgcgggccagcgggagcagtgcgggcagcatgaaacacaagcgcctgtcccgtcattccaccgccagccacagcagttcccacacctcgggcattgaggcagacaccaagccccgggacacggggccagaagacagctactccagcagtgccatccaccgcaagctgaaaacctgcagctcaatgaccagtcatggcagctcccacacctcaggggtggagagtggcggcaaagaccggctggaagaggacttacaggacgatgaaatagagatgttggttgatgacccccgggatctggagcagatgaatgaagagtctctggaagtcagcccagacatgtgcatctacatcacagaggacatgctcatgtcgcggaagctgaatggacactctgggttgattgtgaaagaaattgggtcttccacctcgagctcttcagaaacagttgttaagcttcgtggccagagtactgattctcttccacagactatatgtcggaaaccaaagacctccactgatcgacacagcttgagcctcgatgacatcagactttaccagaaagacttcctgcgcattgcaggtctgtgtcaggacactgctcagagttacacctttggatgtggccatgaactggatgaggaaggcctctattgcaacagttgcttggcccagcagtgcatcaacatccaagatgcttttccagtcaaaagaaccagcaaatacttttctctggatctcactcatgatgaagttccagagtttgttgtgtaaagtccgtctgtgtgcagctgtacaggcagcttactgtttgctagaggatgcgaaagtcataagttctttacatattacttgtgccatatcttcttcaccctaaacatagctctttctttataatatttgtgatgatggaaacaaaagccttggaacaattgcactttaagtattacacagaagtaaaagaactacagaaaatgtacagcaagacaagtgcccggaagttcactgatccttcagaaggaaatgcgagttcagttacatgtaacatcacatttttttatcacgtgaaagatgttagatttgtttgcttataaatttt

SEQ ID NO: 3157 - protein, 620 aa, Homo sapiens
MNKLNFHNNRVMQDRRSVCIFLPNDESLNIIINVKILCHQLLVQVCDLLRLKDCHLFGLSVIQNNEHVYMELSQKLYKYCPKEWKKEASKVRQYEVTWGIDQFGPPMIIHFRVQYYVENGRLISDRAARYYYYWHLRKQVLHSQCVLREEAYFLLAAFALQADLGNFKRNKHYGKYFEPEAYFPSWVVSKRGKDYILKHIPNMHKDQFALTASEAHLKYIKEAVRLDDVAVHYYRLYKDKREIEASLTLGLTMRGIQIFQNLDEEKQLLYDFPWTNVGKLVFVGKKFEILPDGLPSARKLIYYTGCPMRSRHLLQLLSNSHRLYMNLQPVLRHIRKLEENEEKKQYRESYISDNLDLDMDQLEKRSRASGSSAGSMKHKRLSRHSTASHSSSHTSGIEADTKPRDTGPEDSYSSSAIHRKLKTCSSMTSHGSSHTSGVESGGKDRLEEDLQDDEIEMLVDDPRDLEQMNEESLEVSPDMCIYITEDMLMSRKLNGHSGLIVKEIGSSTSSSSETVVKLRGQSTDSLPQTICRKPKTSTDRHSLSLDDIRLYQKDFLRIAGLCQDTAQSYTFGCGHELDEEGCNSCLAQQCINIQDAFPVKRTSKYFSLDLTHDEVPEFVV

SEQ ID NO: 3158 - DNA, 1210 bp, Homo sapiens
gaccagagagcccaacgcctggtgctcaagactttctccgagtgccacatgcttgttggagagagagaaggcaagatcagggctaccaactgtagctgtgcaggttttgccatgcaagctatgaaacccacgtagtcgaacaccgtgatgcttctcctgcagggcgtgtgatgaggaggcgagcttggctttggagtgctgggaacctgaggaattgccaaggacccagagcccagccctgaccaccagagtgcccaaaacacaatgaacaaattgaattttcataacaacagagtcatgcaagaccgccgcagtgtgtgcattttccttcccaacgatgaatctctgaacatcatcataaatgttaagattctgtgtcaccagttgctggtccaggtttgtgacctgctcaggctaaaggactgccacctctttggactcagtgttatacaaaataatgaacatgtgtatatggagttgtcacaaaagctttacaaatattgtccaaaagaatggaagaaagaggccagcaaggtacgacaatacgaagtcacttggggtatcgaccaatttgggcctcctatgatcatccacttccgtgtgcagtactatgtggaaaatggcagattgatcagtgacagagcagcaagatactattattactggcacctgagaaaacaagttcttcattctcagtgtgtgctccgagaggaggcctacttcctgctggcagcctttgccctgcaggctgatcttgggaacttcaaaaggaataagcactatggaaaatacttcgagccagaggcttacttcccatcttgggttgtttccaagagggggaaggactacatcctgaagcacattccaaacatgcacaaagatcagtttgcactaacagcttccgaagctcatcttaaatatatcaaagaggctgtccgactggatgacgtcgctgttcattactacagattgtataaggataaaagggaaattgaagcatcgctgactcttggattgaccatgaggggaatacagatttttcagaatttagatgaagagaaacaattactttatgatttcccctggacaaatgttggaaaattggtgtttggtaagaaatttgagattttgccagatggcttgccttcagcccggaagctcatatactacacggggtgccccatgcgctccagacacctcctgcaacttc

SEQ ID NO: 3159 - protein, 316 aa, Homo sapiens
  VARIANT (1)...(316): Xaa = Any Amino Acid
MNKLNFHNNRVMQDRRSVCIFLPNDESLNIIINVKILCHQLLVQVCDLLRLKDCHLFGLSVIQNNEHVYMELSQKLYKYCPKEWKKEASKVRQYEVTWGIDQFGPPMIIHFRVQYYVENGRLISDRAARYYYYWHLRKQVLHSQCVLREEAYFLLAAFALQADLGNFKRNKHYGKYFEPEAYFPSWVVSKRGKDYILKHIPNMHKDQFALTASEAHLKYIKEAVRLDDVAVHYYRLYKDKREIEASLTLGLTMRGIQIFQNLDEEKQLLYDFPWTNVGKLVFGKKFEILPDGLPSARKLIYYTGCPMRSRHLLQLX

SEQ ID NO: 3160 - DNA, 2434 bp, Homo sapiens
gaccagagagcccaacgcctggtgctcaagactttctccgagtgccacatgcttgttggagagagagaaggcaagatcagggctaccaactgtagctgtgcaggttttgccatgcaagctatgaaacccacgtagtcgaacaccgtgatgcttctcctgcagggcgtgtgatgaggaggcgagcttggctttggagtgctgggaacctgaggaattgccaaggacccagagcccagccctgaccaccagagtgcccaaaacacaatgaacaaattgaattttcataacaacagagtcatgcaagaccgccgcagtgtgtgcattttccttcccaacgatgaatctctgaacatcatcataaatgttaagattctgtgtcaccagttgctggtccaggtttgtgacctgctcaggctaaaggactgccacctctttggactcagtgttatacaaaataatgaacatgtgtatatggagttgtcacaaaagctttacaaatattgtccaaaagaatggaagaaagaggccagcaagggtatcgaccaatttgggcctcctatgatcatccacttccgtgtgcagtactatgtggaaaatggcagattgatcagtgacagagcagcaagatactattattactggcacctgagaaaacaagttcttcattctcagtgtgtgctccgagaggaggcctacttcctgctggcagcctttgccctgcaggctgatcttgggaacttcaaaaggaataagcactatggaaaatacttcgagccagaggcttacttcccatcttgggttgtttccaagagggggaaggactacatcctgaagcacattccaaacatgcacaaagatcagtttgcactaacagcttccgaagctcatcttaaatatatcaaagaggctgtccgactggatgacgtcgctgttcattactacagattgtataaggataaaagggaaattgaagcatcgctgactcttggattgaccatgaggggaatacagatttttcagaatttagatgaagagaaacaattactttatgatttcccctggacaaatgttggaaaattggtgtttgtgggtaagaaatttgagattttgccagatggcttgccttcagcccggaagctcatatactacacggggtgccccatgcgctccagacacctcctgcaacttctgagcaacagccaccgcctctatatgaatctgcagcctgtcctgcgccatatccggaagctggaggaaaacgaagagaagaagcagtaccgggaatcttacatcagtgacaacctggacctcgacatggaccagctggaaaaacggtcgcgggccagcgggagcagtgcgggcagcatgaaacacaagcgcctgtcccgtcattccaccgccagccacagcagttcccacacctcgggcattgaggcagacaccaagccccgggacacggggccagaagacagctactccagcagtgccatccaccgcaagctgaaaacctgcagctcaatgaccagtcatggcagctcccacacctcaggggtggagagtggcggcaaagaccggctggaagaggacttacaggacgatgaaatagagatgttggttgatgacccccgggatctggagcagatgaatgaagagtctctggaagtcagcccagacatgtgcatctacatcacagaggacatgctcatgtcgcggaagctgaatggacactctgggttgattgtgaaagaaattgggtcttccacctcgagctcttcagaaacagttgttaagcttcgtggccagagtactgattctcttccacagactatatgtcggaaaccaaagacctccactgatcgacacagcttgagcctcgatgacatcagactttaccagaaagacttcctgcgcattgcaggtctgtgtcaggacactgctcagagttacacctttggatgtggccatgaactggatgaggaaggcctctattgcaacagttgcttggcccagcagtgcatcaacatccaagatgcttttccagtcaaaagaaccagcaaatacttttctctggatctcactcatgatgaagttccagagtttgttgtgtaaagtccgtctgtgtgcagctgtacaggcagcttactgtttgctagaggatgcgaaagtcataagttctttacatattacttgtgccatatcttcttcaccctaaacatagctctttctttataatatttgtgatgatggaaacaaaagccttggaacaattgcactttaagtattacacagaagtaaaagaactacagaaaatgtacagcaagacaagtgcccggaagttcactgatccttcagaaggaaatgcgagttcagttacatgtaacatcacatttttttatcacgtgaaagatgttagatttgtttgcttataaatttt

SEQ ID NO: 3161 - protein, 612 aa, Homo sapiens
MNKLNFHNNRVMQDRRSVCIFLPNDESLNIIINVKILCHQLLVQVCDLLRLKDCHLFGLSVIQNNEHVYMELSQKLYKYCPKEWKKEASKGIDQFGPPMIIHFRVQYYVENGRLISDRAARYYYYWHLRKQVLHSQCVLREEAYFLLAAFALQADLGNFKRNKHYGKYFEPEAYFPSWVVSKRGKDYILKHIPNMHKDQFALTASEAHLKYIKEAVRLDDVAVHYYRLYKDKREIEASLTLGLTMRGIQIFQNLDEEKQLLYDFPWTNVGKLVFVGKKFEILPDGLPSARKLIYYTGCPMRSRHLLQLLSNSHRLYMNLQPVLRHIRKLEENEEKKQYRESYISDNLDLDMDQLEKRSRASGSSAGSMKHKRLSRHSTASHSSSHTSGIEADTKPRDTGPEDSYSSSAIHRKLKTCSSMTSHGSSHTSGVESGGKDRLEEDLQDDEIEMLVDDPRDLEQMNEESLEVSPDMCIYITEDMLMSRKLNGHSGLIVKEIGSSTSSSSETVVKLRGQSTDSLPQTICRKPKTSTDRHSLSLDDIRLYQKDFLRIAGLCQDTAQSYTFGCGHELDEEGCNSCLAQQCINIQDAFPVKRTSKYFSLDLTHDEVPEFVV

SEQ ID NO: 3162 - DNA, 126582 bp, Mus musculus
  misc_feature (1)...(126582): n = A, C, G, or T/U
gtttcatgcagtgcctacagaggctctgcaacgcatacagttgtgagctgccatgtgatgctagaatgcaaactcagaacaggagttacatagagttgtgagccatcatgtgggtgctgggaattgaacctgggtcctctgtaagagcaggtggtgctcttacctgatgagccatctctctagccttgagttatgcattctttttttttttaagatttatttattattatatctaagtatactgtagctgtcttcagacacataagaagagggtgtcagatctcattatagatggttgtaagccaccatgtggttgttgtgatttgaactcaagaccttctgaagagctgtcagtactcttaactactgagccatctctccagcccgagttatgtattcttataaaattgaaactaaataggacagttaccgagagttgtgactttgccatgttggggtactgggacttgaacctgggtcctccgtaagagcagcaggtgctcttaactgccaactatctcttcagccccagtagtctcattttgactaaatcaagtaatacaggataaacttgttcctgcctgatggagataaaatcccctctgtcaccctctggataccactctggtccaagtgtcagagcagctcactgcgcgtcctggctgcacacactagagccacaaagggagccaacacacgcacactcagcgctcgagcctcccccctaagatgctggagaggacagacacttctgaagtctcagacaaggaagcattaatgttctgcacttgctgccctggtctcactcctcatgctgcagcccagttttctctgaagtaatgataatgagaaacagaacttgctcatttcagagaatgccttaatagtaacaggatataaattattcttttcatgtgtgccagttacgtaagacagtacaggtactttatgggtgttagtaagtgccagtgcccaatcaaagaaataggtctgtacaaacaccatgcatcattctttagtgagacagtgcatatgtgcttttctttatctgctgtctacacacagctagaaaggaggacctcacatctgaaggaaatacttgaaaacagaggtaccgagaaagcagcagaccagctcaggccttaaaatctaataaacatgcggcagggacggggttttggatgtctcctgttttgcgttatatacttaaaactgaaaatggacaacatctacatgggaccagtaagacacaagactgccctgaaagcctagtctaataaaacaccaacagaggatcagcaaaaggacagaatgttttttttttttttaaagatttattcattatatgtaagtacactgtagctgtcttcagacactccagaagagggcgtcagatatctttacggatggttttgagccaccttgtggttgctgggatttgaactcaggacctttggaagagcagtcagtgttcttacccgctgagccatctcaccagcccggccggaatgtttttatacacgaaccgctgtactagcaaacagcaccgttaggtgtgcaaacagcacaggggattctatctccatcaggcaggaataagaccttctactatgtcagtagaagactagctgctatcccaacaggagatcaaccaaggtatctgctttcttctcctctggggtaccatcaaaaaaggcctggctgggattcaaggtcagctttactgcccttccctccatggtaagcaggcctcctgtggtactaggagcagcatacatggagtggtcatgaggcatgttagttagcccaggtcagtcagggaggtatagaaccataaacaggtctcctaatttggccactcacataaacctacaaattcaagcaggtgaatgaaccttgaacataaactcaaggaaatccccattaagataaattatcatcccccacttagccaaaaggtatcacttttcgttttcccttgagacacaagggcttactgtgtagtttgcacttagctcaaattcatgttcctcctgccttggcttcctgagtgctggggattatgctaaaactttctgataaaattcaaactactgaaagacaatacctgccactaagactgtaagcaagcagccgagtacatttggagtaaccccagtattagggagacagaggcaggaggatcaatgtagagtaagttcaaggctaacctgggtggcttcaaaatgactgtggacaaggagagatgtctgctatgaggcacaaggagaatattactaagagcaatggagcaagaagggaagcacagacctgtcccgatctgaggcgacacagacacccacacaatccacagagcactctgagaactcacatgggagcccagcaaggcttagttggcatacaaaaccaaactgcacttctctttcctagctacaggcgcacgtacagcggagttaaatgtagtacaaattactatgattcccttcagaaagatttaaaggtcagcctatctaaacatgtataacatatcttgaaaactattaattttttttcaatccttccaccccccaaaaatgagaggcaacagttggccaacaaaatgaactcaatgccatttctgtgggctttttgtttcattttgctttgctttagcattttttggttttattcatcttttgcctgcatgttttgatttctttttttgtgggggtggtttctcattttttgaaaaagagaaagaacataaaattggatacataaggaggtgaggaggatatgggagtagttgggggaggggaaaatcatcaagatatatgaaaacaaaacatttaataaaaaaaagaggaactctcagaaaaaggagaggcattgatcatagactgaaaaggctcaataatataataagaatgtcaattttctctaaactgatagacacatttaatccaagtctttctacgatctcagcaaggtttctaatataggtaatatgatgctaatcaaaaggactaaagtagtggaaatgaagactaaactgggaagaatcaatttaattgattgaaataattttcacatagccggtaatcaaaaaccaataggatggaaaagtaactcctaagagagcacacactgtgtgattctattgctgactggatcggaactaactatagagtgggctgttctcaaactcagagattctcctacttgtgacttcaagttctgggatgaaaggcatgcaccagcatcccaggctgaaatattcttggaatgacagagttacatgaataccgaacatagtattattgctataggaggaacctatgagagacctatgagatagacacgtgctgtgtcttgactgtacatcagaccctgtctcctgtggtctggttttgtatgctgttaactcttctgcagggcagggtaagggcataaatgacctctgatatcacaagtccacgtgaaggagtatgtaataatctctgaataaagaggccgaggaaacgctcacaaggtagcagtgctgctcttccaggcagctcgcagctcccagcatccatgctaccaggcagctcgaagctcccagcatccatgctaccaggcagctcgaagctcccagcatccatgctaccaggcagctcgaagctcccagcatccatgctaccagacagctcatgagcactgggaactccagctcctgaaggtctaacaccctcttctggctgccaagggcagttgcatacacgtggcaaacatacaaatactcacacatttttttctttaaagttacgtaaaaagaaaaggtctaagatttggtaatatctcttgcatagaattaaatagtaagtgaagcttctgtttgatgggaactttaaaatgtgagaatgaaacatacttgctgatacgcacactgcctactgaaggctcattacactcaggaacacactgcaagccaggtatccacagttcacactgaaaatgacacatctcatttccttgccttgaggtccttagaaacttgtatgataatgccaaaatctggttctttttcctacatccaaccttgtgtttctttaggttgaaattcttgactttttttcaaaggttgcacggcaaaatacaggaaatctttacatgttctgtgtcagggattggtacactggtgaggggggcttccatacccctcacatattatctactactggtgacaatcagcctcacgaagcccaggctggcctccaacttgttttccagccaaggatgactttaaacccctgatcctcctacccatacttcctaagtgccaagattataggtgtgttccatcatgcccaactaagtgattttgtcaatgtctcttaatatcctttaaccatttcctttctgtgcatgtctgagcgtaagtacctacagaggctggaagagggtgtgagattccccagaactggagttacaggctcctgtgagttgcctggcctggggggactgagaattgaacgtcagttctttggaagggcagcaagtgttcttaaccactgagctatctctccagcccaggttattcttttatttgatcctggtttccagagttcacatcaaatggcttgttattgaaaagacaaatattaaaacagggtttctttctgattatcctctgaaatctggaaggaatgggcagaactcacttaggtctgagaacgactacggaacagggctagtcttgtggctaccaacatctcagagaagcacagacactcagaggaagcagactttatcagcgcaaaccttttctgatgcatcagtttcttttctgctctggaaaagcaagtgccccgccttctgcttgtcttcagtgagactggatttcttacctgaaaattgaatgcatactatgactactgaaggccctttttaatgaaacctaatttcttttggttaatgattttttgaagagatttcatttatttattttatatatgagtacactgtagctgtcttcagacacaccaaaagagggcatcggattcccattacagatggttgtgagtcaccatgtggttgctgggaattgaactcaggacctctggaagaacagtcagtattcttaactgctgagccatctctctagcccttggttttgttttgtttttttttaaacagtctctttatgtagatcaggctggtcctgtactcagagatctgcttgcctctgcctcccgagtgcagcaaggacctttacctgctcagctactgcaaagctttaagagatactgtggtttgccttcatttaccttagtgtacatgcaggcaggaggacagctggggaggcggttctctccttccagtacgaatgctggaaccgaggggtacaccacgcaccctgcagctaactcattttaaaggctcttcatttttatcactctgaaactgaatgacagacacaccaggctttcccttgagggcggaggagtcaaatcgaagcactgggcacgggaggcaaaggctccatcaccagtcccacctgcaggtcccctgccttgttactaaggaaaggagtttacgtagtctcgagtttatagtcacctgcatattttttaaaagaaacgatgtcatgctataccttaaaagtttttttgtgtgagtcttctgataactttaagaaagatgaacagttcaaacattaaatttacatgaggtaactttcagattaactagaactcaggaccactggaggcattcagcctttaaaatccaggattttccccattacattttaacaactgtatgatatgaccaataagctatcattttgaatgttacttatataacaatattctccaaatatacaaaactattataagctcttttgataatttgtatcttcacatttattaagtatgtctataaattgtgttatgtgttttgagacataaggtctcatgtgtcctagaattttctatgtagcccaggctggactggaatttgggatatttactagtgctgagagtacaggaatggaacaccatggccggttgtaatttcttctctaatgcaccttgttccttcctaaattaattttgtaggcatgttattgtacactgtgtaaagactatccttgtattattcaaatgctgatttctgtgttcctgtatctggttgtaaaacattgctttccaattattccctgattagtcaatacagaagttgatcagtaaatgactgatcaggggagagaagagggctggatttcctcccagccaggggaagagggaaagagagcgaagaaaagggaggatttgccaaggggagagtccaggcaacaccatgagaatacacctgctgtcccacgagccagatcagtattaaaatgcaagcatcacagggcttctggctagaggtagtcagagtagcatagaggattaaaataaagtaacacttctcagttgctgtgcccttagtttgttaaataaatttaacagttcagtctcaattatttgggagctagttaaagaaaaactgtaataaacatccataaataaatcccccactaacaaattcccttttcagaaaggaaatggagatcaaaagagtgaccaagcaccctgaaatttgtttcatcatctcacaatttccagaaatttaatatcaaagagtaattaacaaaccagtcatggtggtgcataccttgagtcctcaggactaaagtactctggactttagcactctggaggcagagacagacatatctctgagtttgaggccagactggtctacagacaggactacatagaaaacaaacaaacaaaaagaaaagtaattagtaagggtgtggtagggagaggattaatatctgtttctttctaaataatacgtctatttgtaccaactctgaaactaaatactagtaagacttaaattcaatttataagaagtgattcttctaatattgttaggtactacaattgttcttagtccctgcataactggtaatgtgattcgaaaccttgaggttttgtcaaagcctttcaatggatagaactatagggatatgctaggaaacaagagataccaccgtcttcaagcacctctctaggttatttatgaagaatctgttcctctcattgttaacatagacagttaccaccataattaaatgggtcaatctagcatcacacaaggtccaatgctaccactaggaaaaattccccgctgcgacgctctagggcacacaccattactttagtggcattctggtctaaaaatattggctctttttctggtcatgaaggaataattaggaaaacccatagtgtagaatagctaagaaaactagactagttttcaaaaataagatgaggagctagagagatgctcagtggtaagagtactcgtagccaggcagttagcgcacacctttcatcccaacactctggagggagaggcaggcagatctctcagtttgaggccagtctgatctacagccgagctagctcaagacaggcagaactgcacagagaatccctgcctcaataaataaaccaaccaagtacccctcaaacaagcaaaacaacaaaagagtactcattgctcttgcagcaagttaggttcccagtatacacagctcacagctggcaggagcagttccaagcaagggtctgcaactcctctctggcctcgtcaagcaccaggcagtcacatgatacatatacacacatgcatacaagcacgtgtggtggctcatacctttaatcccagcacctgggagaggcattcagatctctgagttccaggctctcagcagaggaggagggaagggagggaaagagagacagacagaccacttccagctgtgggacctggccttttaatgacataaggcagctggccactctcgtaacaataaaggcaatttttagataattaagaaaatctaaatgtcatctaagtgtgataatctttgcagactgtaatgccctttaggaggcacaggctgcaacaattagggctcaagctcatgatgtctgaaacttatttacaaatgcttcagtgaaacaaagtgtatctacagatgtatttagggaagggtgaggggaacttgatgtgaaaatgaggtgggggggagaaacatagttaaaaaaatgttgacaaaaagaataataatcccctaaactattttttgttcagaggctataagtcagtgtttattttgagagttcaaatacttaatagaaatttttttattttattatcttattatttttcacatgatcctttagattatttgcaggtttagttaggttgtgggatgaacagacaaggttgtttttttttttttttttttgtctttctctctttctttctctctctctctatctctttcgacagggtttctctatgtagccccagctgtcttggagctctttgtagctaggcctaaaggctgccactacacccagcattacaggcaactcttaattaactcagtgttaatcatagctaaaagcacttgaaaatgaattcctattgtttcccgattcaaagtctagcctcaaggaagatgagaaccacgctacttggggggtggagtcccaggtctgacattcgttacaaattatttactcaggtcactttactgattgctgttgcagttgctcagcgttttgaaattagaggggaaaggtcattttttttcatatctaacttttatatagaaattacagaagttaattcatccctaaggtctcttgcagctctgacattgccattcggtcttttaatacacttatacaacaaatcatgaaccaacagataaatctacaacaagagaaaatgtaataggtagaaaaatgattaatctattatactttaaaaaaatacattttaaaagcttctagcaaggcgtaatgggaaagctctaagcagtgcgttctccaatatgagacctgggaagggtgcgagcccttgtacctaatgacataaggcatagtgtgcagacagggtaagagccgaggaagtctagattttcagtaaaggggctcctgtctgacagctcaaggtcatcgagtggctggctaccttgtaatctcaaagcgtgcccccaagcgatccagtcccgggtgggcggtgtctcggggcctagggtccccaccctcggggtgacaaggcctccgggacacggctggcctcccgctgcgccgcgctgccggttgcgcagccccacgacccgcgtgcacgcggcgtctccctccggggtacctgcccgctccctttcccgagtgaaggctgtcaccccactggccgcgaacccgggattatgaaagcagaggaaagggaccatacttagccacaggatctcgcctctgacaccgggaccgggctgaagagctgcggggcaggtagcgtgtgagctcggagggtcagtacagagcgagcgccgcgccgcggaaagctgagaacacgtgggggcagtgatgtcaagcatggcttcagacccttagacgcagattcgttaccacgtgggaaaatgtaggaagaaaagcaagtgcccaagcaaattctaaaaatcatctaagaattaacttttgtgattatctgttcgtcagtgctctctgtacttttcacttccttttccacggcaacggaatctgtcgaaatttctagaaagcctaatatgcttaacctactaggtttctaacggtctgcagttcctacagtgtaaataacccttgataaacaaaagtgtttatgggctaatcgagaattcgccattcctctaggaatacttagtactgtgtccaaacataaaggcgatattctgcctttaaaaaaaaaaagtcacatctcctggcagtcttttatgttgggagtttgtttccacccggacacgaatggaagagcaccagagcactcccgttccggtcgggggggggggttggatctttgcgcgcatgcgtgctgacgctcaagggcgggttttcggggaagacggtattgacccgcgaacaaccgaagctgttattctatcaaaatcaagacggcgtgtgtgccggactctgtggagactctgaagactaagttgaggtgtccgaaattgcgtcctgactcgtagaaagaaatctactaagctcttatgagggtggtgttttaaaaaacacgattttaacgttgcctgctcgtctgggtctccttaacaaatcctaaccccgcctccacgtctgttggggttttcagctgcagctctgggtttggaggagtgcgtttttattacggttcccgtggcttctcttttgctcttggcataattcctttgaaatttatttcttcgatgcattaacagactcagtgggatcaagactttttgttttgttttgttttttgtttttgtcgtatttagccctggattaaatgtcaaaatcgaaatttacagctttatggatattttgcctatagactttctaagttaatgactgcttcataattatttttggaactcaggtgtttttcaaattcacttccaccattacttcttttcctggtactcaaggagaaactgcgtccttaagttttgagaagctagaattccctctgttaagaacggcgggacttgatttgtgactaaccagatgaaaaacgttgagtttagcctggaaagggggcaaaggcttaaaatgccagcgaggaaactgcgagagattgtttctccaaaccaagggaataaattggctgtggtggaagatgagctgccccgtgttcctccagccctggctgcaaataaacgtcttgctgttgaaacgaggactagttctaatggaacgttatgtggtatgtgattccaaatgtttcagtttcccacccagtttacgttttctctctctctctctctctctctctctctctctctccctctctctctctctctctcttccgagacagggtttctctgtgcagctctggctgtcctggaactcactctgtagactaggctgtcctcgaactcagaaatccacctgcctctgcctcccaagtgctgggattaaaggcgtgcgccaccactgcccagccagtttcctttttttataagtcattagtctttatcactattttgagttgtgcattcccccaaatttaaaggagtcagtgtttacattcaaaaatgtaagatacaagtctggtttgtaaagatgtttgaaaagtaacttggttccctggggaaataggattcagcatgtagaatgagagagacttgactatttcctcttgtgcacctctgcctcccgagtgctgggattaaaggcataggctgtctgttaaatcagagttttatatcaatctagtgttttttggttttgagacaagttttcccttgtcctgattggccttgatctcacagaaatctgcctcttgaattctgggattaaggcatgcattaccatgcctggctatatacaaggtttgttctggtaagtctcatatttttttttttttctgcattggataaaatatcttttagggttttcaaaaataccactttcaattgtgtgtctatgtgtaggtgtctggaaacgagttcaggtgcccatggcagccagagtagctaaatctacctagagctagacttaacaggtgattgggagccgtctacaggagattccaatctccagtcctttgcaagatcagcaagcacttttatcttgctctgccatctctccagtccctgaaaatgttttttaaaaaagacatctcattttattttactgagagaggatcacattgtgaagctctgcttggcctaaaactcactctgtagactgggctagcctcaaactcagagaatttcctctatctctgcttttaagcattccagttaaagaccttccacaccatggctgctgttaaaacattttagatctcacctgcttaccttacctgttttaactcagccttattttgttaaataatgagctataaagtctttcattagaatgtatttaaatatatctaatttctcttacaggaaagtgacttcacatttggtttttacattaatacagagattctcagttcttgtatcatggctacacagttgctaagggtcaggttttgatttaaaagctgctcagattggacccgtggctcaatgctagagcttactgtgaaaagagccttggttgggtccctgggaagaatcacaacccagctctcagggactctttttttttttttttttttttttaagatttatttatttaatgcataagtatactgttgctatcttcagactcaccagaagagggcaccagatcccattacagatggctgtgagccaccatgtggttgctgggaattgaactcaggacctctggaagagcagcagtctgtgctcttaactgctgagccatctctccagcccactctcagtgactcttttgctttcttaggctccttggatttaacttctgcaagactgtatcaccagcctctgttagaaagtcctcctgcgtccaagaaaagtgtaagtaaaagaattccaagtcacgtatgacagggaacgttttgatctttgttcatttttatcacgtttttaacctttgctgtgtacaagtaagaatggggggccatttttgtatctgaaggtcagaagacaaccttcaagaatgtattctctcctattacgtgagtcccagcagtcaagtttgaatcttcaagcttggcagctggtttcttcatctgttgaaccatcctaccagctccagcagtgttttatagattatgacttgaagagtgtgggacatacaagcatctgttgaattgttaatcttgtttttgtttgtaaattaacacccatcatcaccttaacattaagaaaaaaattttttttttccattttcatttgtgtacacggtatgtgtatgtgtgttcatgtttgtgtatggagaggtaaggggcatgtgtacatgtcatggcttgagcttgctgtcaggaagcatcttccattgcccttccaccttatttcattcagtcagggtgtcttagtctaactgaccacctgcccttgggctctcctgcctcagccttcctctcagggctgcagttccaggcaggctgccacaccctcctagcattgactttggttctggggatccgagtgctggtgaggcgagcgtaactgctgagcgtctccccagccttttatgtttagtggaaaaaaggaaggggaagagcagcatggggtccgtctcagcgcggagccccagagatgggttctaggctcacactcgagagccggaaaccggagcagtagatgtgacccacacagcacagccttgtaaggcagcgcgtgacctcagtgactaagaaagccgtgcttaggttgcagtgtagacggtcaagtgtggatttgaatcagtttcttgttccacttctgtgtgtgtgttcactttgttacgtctcactattctgactgcacgttgctcattcactgagaaatcctcgtgtgcttcagagcagctatggaaggtgtagtgttgggaatgacgtaagtaaagtgtgcagacctgccttcccgggtctcagtgctcaaaaggctatgaatgtcactctgctagtgctaatttaagctcattcaatcttactcttttatgcccaaaggatttttctaaagatgctgtagttcggcagttacctttgaataaaacagaagagaacaacgcaccaaaaggtaaattaatacagttgactccgcttaataatccgcttgataaagctgagttaaaatgtacagaaaatactttatttcattagttttgaatgcacagttctgtgacattgaccttgataacattcagtgacatcgagccagggttactatcattcacctctagacgttaagatccccccactgggctctgtgccctcactcctcactcttgcccctgtgactttgaccagctcaggtacctatgtcagtggcattatacagtgttaacctttgtgactgttttactttacataatgtgcttaagcttatccacattgtagtatgtgtcagtattttctttgtaaggatagaattggcttttttaaaaatttagggtaatttattattttgtgtggataggtgttttgcctgcctgtctgtctatacacagcactcttgcagtgcccaaaaaggccagaggaggcagtcagatcacttgggactgaagttatagagggttgttagtcaccatatgggtgctgggaattgaatgcaagttctctttaaaagcagctgtgctcttaactgctgaaccatctttccagtccagaactggtttattcattcaatagcttagtagtatttattttgtgcttggcatcaaatccagggccttctgcatgccaggcaaatctattgtctgtatcctgagctcctattattttaatttttggttttcttttcaaattaggttaccagtagaatctaaaatctataaaaggatttacacaggagaagcctattttgctattacaaactcattgcaaaggtttggtttgggctctttattttattgtgttggccctggctgatctagaacttgctagagtagaccaggctagcctcaatggtgcagggaactttgtgcctctgtatgctgagtgctagacatgagctgcagatcgaaaattaaagttcatttttttttttttttgtttacaaagtatcagggatcgaacctaggatcccatacattctgagcaggcgctctgccactgagctacatcgctagccctcagtcttggctctctttgttcttcagaatctaaatatatttttgtgttttaatttttcagcaaatgacatctttatttctcagtacaccatgggacagaaagatgctctgagaactgttttaaagcaaaagtaagtttcatttacaaacacacttatagtggtatgctaccttaaattagaaggaagctgtatgttagcatatgttagataatccatacacagcgattaagaagaacacagcaatgttttaaaactgaccacagcgacttgtagggctgtggatgtagctcagtggcagcatgcacagtctaggagtgtgaatgtagcttaatgcaggctctacctgccctctgccctgctgtcttgttcactctaattgttagcacagcccccgtatctgacagtgtgcacagacggcaaagtaactggagctggaacaggaagagcattgcatttggtggatcatccagacacgtaaaccgtggggtgcctacttattcagcgtggctctgctgcaactcaaaaggagttaataacgggagagatcagcaagtactatagagacaggcttgttgaaaaggcatcaactgtattgcatccagggaggaaagtagtgacttcggtagaaggttgggagttcagaaagaaaagcttgacattagctgtgggcccaatgcttatttgtgtcttcaacaagaagagctttgtgactccacatagatggtgtttggcagaggcaatagctatatattataaagttgggcagccagaagaatggcattgtgtggtgggaggcagtctcatctgagaaagcaggagtctcatgggaaagcctgtgggagttggactccgccccctactaaatcgctggctttggtcaagtaaaccctaatacctccagacttcagtctcattatgtaaaattaaaaataaggatggaaggccgtaataagattctctaccttcccaattctatctgtggccgttgtcatgtaattatgatgaagtaattgagaaaacttggtgactcagttgggtatgacgaggtccgagatggagaaaccaaagtgacttgatatgtttgaggtgctcagagaacagttcctctcttagctacgaggaggcatcagagagaagtaagtgccagcacattcactgtgctgccctcgggcctgatgtgagggaactcagggctgcccgtggcaggtccctgcctacagcgcttgaactcacttagtaattcctatgttttggttgatttcgccagtttgttttggtctaaattgagagtgcaatggactagctcttttaaaaaactgaagccagatatctgtctgtttgctttgttcttgttttgtggtaagggggaatgaactcaaggccttgggcatgctagcatgtagcacagagctattatcccatcttgctgtactcgtgtgaggcgcactgcctaatggtgtgtttggtgctcattaaataagtaagccagcagagaaagggaattatcgtgtgagctagatcagttatgtgcagcacaggcacagggtagattggtggtagccacaggctggtataatgggaaatggggagataattaccagagagtccagtttcagtcaggatgactacgtagtagaactttttatgtagcctgacaagtataggagatactaattactgatagagtagcttaaaatgttcttaccatagaatagttgtgtaaggtaatggagatattcattagcttgattgtgctatttcacattgtatacatgtatcaaaacatcacattatatactgcccattatactttaaatttgtcaagtgtatcttagcatatctgggaaaaacagtatgcatcattgatgttagtttttttttctgtttatttttgagattgtattttgattgcaatgtttttctctttcctttcttcccatcaagtcctcccatatgcccctcctcactttccttcaaattcttttttatttttagatgtttacttaattttatgtatgtgagcacactgtagctgtcttcagacacaccagaagagggcatcagatcccattacagatggttctgagccaccatgtggttgctgggaattgaactcaggacctctggaagagcagtcagtgctcttaaccgctgagccacctccccagccttctccttcatattgtatgcttctttttcatcagttgttactggatgcatagtgtatttgcatgtgcatatagatccccagatgaagcctgttgagtccatttagtgttacttgttatgtatgctccagggctgactggttggtcatatcttcccagggaaggccccctctctcactcccagcttccttccctcggttgcctgtggttctctgtgtaggcctgagaccttgtgggctttcctcatccagtttgccatgttcattggtgtttttcttctgctcacatctgggcagtcatgttggtgagacttggtgggtgtggcttgtgatgttactaggagacacaacctcacagtaaagtcccagatcatctggctcttagagtctctctgccccctcttcctcggtgttccctgagccttaggtaagggctttgtggtggtcatgagtcatgaggactctgccctttgatgggttgtggttttctgtagtgttctccatctgctgggaagagaagttttcttgatgcggggtcctcgtttgtgggtgtaaggacaagtgtttatagattcttgttagggtttgtgctggtttagtaaattagtggttgtagattctcctctagtgaccatgatttcactagcactggctagttagatttctagtacctcttttgttgagcaagtcttaagtcttctgagagagcagttggttactagcaggatatatgtgccacctctgcacctgggggttagcttgccctgctggttgttgatgtagttcatggtgtcaaaggtggataggagtgttggttttctgtctcttttggaagccagcaaggcaccttcaggtaccatggaagccagtcctcagggaggggacattcaggtcaggtcagctctgtctctgggccgtttctgaagttgctgtgcctttcagaagtcttagacagccctggccaaccattgaaaagacggcttctcatgtctggcatggggttttgtcaggtggtctttggtttttagagagagtgttgtcagcccaggtaaaggaagtcattaaaactatatatttatactctgaattgcctgcattccagttatttaattccttgtgccattttcaggagtccgtgttgttgttttactccctcccccctccctcaggagccccacctctcctctcaggttcccgcacagatctggtgtctccgtgctccgtgcaccttcttccgtatccaccctcctcccttcccgtgatgcggagcttccttttccactgcccatccgatcgcctgtcctctgctctccccctgttccagtcccagcttctgggttggacccttccccctcccctcatcagatcacgtgtacgctgctgttcctctcttcgtgctccccaaaccacctactagagcagtggtcccattgtccctcgtttctgtacttactacgagctatgtgttcacatctgaaggtttagagctaggagcctccaattacagagcatgcgacgtttgtctgtcctgctgggcctgaggtgcctcactcagtatgcttcttttctatttctgtttacctgaaaaattcatgatttcttttttcttgagcactaaatagtattccataatgtatatgtgtatggaccacattctcagtatccattcttcagctgtaggacatttaggttgtttccatattgtgactggaacagtaatgacatggctgtggagtagggtattgagtcctttggccatataccaaggggtggattagctgggtcctatggtagatttatgtatttagcttttccagaattttccacactgattttcataatggtgcaacagtttgcattccagctaagggaataagagttcccctgcaccctcgggtgccctgcatcctctggtgccctgcatccacgggtcccctgcatccatgggtcccctgcatcctcgggtcccctgcatccgcggttcccctgcatccccctgtttgttgctggctgttccattgatctttgcctccgttgtcaagtacaggattgtctctgtcatttccatcagccttgtgtgtgggtttattctccttaaacttcctccttgatttcattgacctgtttcttttgtgtctttaaactctttgagttctttggggaagtttatgattgctcttttaagttctgtgtcctggtgttatctaggtaattctcatgggcaggcatttctctaggactggtaggctttggagaggagacactgacttggtcttttatattgttggtattgtcttaatgcgatctgggcatgtggtcttcctttaagttcgtttttttttttttttttttttttttaagtttgctatggatagagtaggctcggggagaagagagaatgtggggatgggttgggtcttgaagttagaagttggaatatagtgcagtggtcagaagggactagggtgcttcctgttccaagatgggagtgtggaggtctgagtggacatgtagagtcatgaagtatggtggataggtaggaggaacactggcccatgcctagagcttctgctgtgaagaccggactaggtagacccagtctaaatttggtagatttcagagaagacatagatgtaaggttgtgtacgtagcagtctgtactctggaggagggcgtggtgtggagtcggtagtggaatgagcactaatggtcctgtgggtagatgcaggtaaggtaggtccaagtgggagttaaatgttggttacagttcaggaggagatggtgaggctaggcctagagttaggatttttggggccctgtggtagcctagagtctgttgctgcaaaacaactagtccatggcactgactgggacctggcctagacctggtgggttgtggaaatataagtactgggcgtgtggggcactcccaggctacaccctggaggaggatgtgagaagtctgagtatggaatgaagtggtaggcactgttggttttctggctttttaaatttttttgaaatgtgctgggattggaaattagatgtcatgcatgtaagcatatacttcctgcactatatctccaacccttaagtttgtaattcttctaaaagcatttggtgaatacaaccatcagttcttagaatcagatgcagctctgctgcctttgggaattaaaccctatgctttgtatttgtgcttcttgatcatctgtctgtctaactgcggctatgtggttgtcatttgtaaatcatagtttcaaaactggtattactgccttcaaggaatagctttttaatatttatttatttatttattggtttttcaagatagggtttctctgtatagtcctagctgtcctggaactcactctgtagaccaggctgatctcgaactcagaaatccacctgcctctgcctcccaagcgctgggattaaaggtgtgtgccaccacatccggctaaggaataactttttatttctttagtccttaatgacctaaatttagtaatactaactaaatgactttagttaatattatcgaaataaccacttaaatttttttatatgtttgggttctttttgcttgcttgaatgtctgtataccatgtgcatacctcaagaagtcagaagagtccaatcccctggaactatatttaaaggtggttgtgagccaccttgtggtggtgtcaggaattgaatctgggtcttctgaaaaacagccagagcacttaacttctgaggcatctcactagcctctgctttaattaaaaaaacaaacaaacaaaaccccaagatggagctgcagagatggttcagttgttatgagtgctcgaagcactgtagaagtctgtgttcggttctgagcacctacatcaggcaactcacactcttccacagtgcaagctccaggctcacatgcacacacatcctctcatgcacatgctgcacataactacaaataaaacaagatcaaagagaaacccagaaggccactttaggagactcccagattagggcatgtaggcatttcttctaatggttcaatgcagatttctgaaaacctttgtttctttgtctttaaagagctcaaagcatgcctgtttttaaggcggtgaaagtacatctttttgaagacacgagtacagaaaagaatactgttgctcaggagactgaaactccacccaatagaattgattcagctacaactgtggctgcggcaactgccgctgccatcgcaacagcagctcctttgatcaaggtacttctctctgctgggcgtctctggaccctgagacacggctgtttgtacagaactgactctggcacagtcgtgtctgactgaacacttagagacatgctagttcccagttggaaaggctcttcttacgtgtggtttgtgggttgtttctcagaaaccgtgaaaattgccccttgtgaatgtgctggtttagagaagccaggacgttatccctgtagggctgacagtccttgttctggatgatcagtctctaagaatcaaagccagggcccacatgtggtgatgggtaagtgttgtcacactgcgttgtattgctagacttgccttcctggaggaaccagaggatttttgcatgatattttatatcataatactagcctgtcagtttgtaatggggaagcagaaatatggcaggataggcataaggttttagaggcagtgggaagcagagtcaagactcagattcagggttgttgacctccctagcctggcgctggagaagtacccaaggctgtgcttttctgtttttgtttttgtatcccaggctgaccttgactttgctctgtagccaaggatgagctttagctgctgatcctcctgtacccaagttctggccttacagataaacgccgtcagcctgctatgcggtgcgagggatcaaagcctcggagtcaagcgtgttgagcactctactgagctccatccctaccgtgtactctttccaggcaggatctgtctgtctgtctggacttgcgttccttctgtgattataggaatgtgccatttcacagctcgggtctggaaccttgaggagggatggcaaaagagtagagaaaggacaggtgtacatatacacacacatagagaaaagctgagggtcaggtgggctgtatgcactctggtggagcctcattgcctaccccataacctggaacctcagctattgtacacagcatgggaggcagggttagctcctctcagtgtgaagtctctgtagggcagcagtttcagactgtgaacagccaggaagaagccgccacagttggtagtctttctgtgtttttgtttttcatgacagggttctctccacagccttggctctctatacagagagcctgtctaggcttaaaggcgtgtgccaccatgactgttttttcttctagcacactgattaatcgtctgtaaacacatttgggtcagaggaagaaggctttgccagttctgagtctgatccatatgagtccaaggccttggttcctgtccaggcgagcttggttctgtgctcatggcagcaatacacgtttattctcagttttgtcccctccacacatgccgtcatgggtggcatcaaaattgacttggttttgctgtttccttctctttagttttaagaatctccccccccccccggcattatagaatcttttgtgtcagatttgatgtgtataaatcatgattggcttgcacatcattctttatgctgtgtagatacttggtgtgttgtcggttatagtgttgttgttgctgtgagacctctccttatagttgacctttcttccttttgtagtattgtatgtgtgttcacatggaggccagaatatgtatgtatagttcaagaaacaaaacatacctaaggattacttgattttgtttcttaattttgtgactctaaaatcaaaggcatggagtcatgagaaatttcgtgagcaaaggctcaagtttactaccgtctcagtaccagttgctgtaaataaccttcctaggacctgagcacacctttaatgtctttctacgatgtgaaattctattttgatgttttgttttaggtacagagtgatttggaggcaaaggttaattgtgttggagagttacttactaagttacaggagactgataaacagttacagcgcgtgacagagcaccaagccagcgttcagagtaagcaagagaaagtgcactgtcatgaccacgacaagcagatgaacgcgttcatggagcagcatatcaggcaccttgaaaaactacagcaacagcagatagacattcaggtatgtgataaagctgtgcgagctcccagctctaactattgttaactagtagctgtcatagcactctaggttgtgacagtttgatttcctaaatcatgattgtcttgctcattattctttatgctgtgtagatacttggtatgttctaggttatagtgttggtgctgtgagacctctccttatagttggcttttcttccttttgcagtattgtaggtgtgttcatgtggaagccagaagttaatttcaatatcttcctcagtcaccctctgccttattatttgagacaaagtctccctgactcctgagcgcaccaatttggtcgtccagcaagctccaggggtgtgcctgtttgctccctttcctcccagtaatgagtctgcacacttgacctaagcttgggtcctcacgctcgctcgctcgctcgctcgctcgctcgcaaggcaaacactgcttgctgagctctctccccagcccggttacattatttttaaagcagtgatttgtttatgtcagcagttccaagtctgtttatatgaattggaatcattgggaaagctttataaaaatgcatatactttgatgtcttggaggctgagggagcagatctatgaaggtgcttgggtgtcattgaaagcttcctcaagatgctgatgctcccatggacagaactccctacaatgtgtagttggtacacagtacctacaaatgttcctgcatttagtttattcaaagtatcagtaccgtaatgccttttgagtatgatatgttgagatattaaaagatgaagaactagctttacaaatggctgagtttttattttggaatttcctagttctggaacacgacccagctccaaaacattttagaaataggaatatataaccattgacagtttcttctttttgtcttttgagacagagtttctctgtatctccctggctgtcctggaacttgctctttagaccagggtggccttgaacccagagatttgactgcctctgctgcctcctagcttgcaccaccaccactgccaggttacatttatttttctatgttcacgtgggggtgggggtgggggtggggctggggaggggtgttctgcatgcgtaggtgtgcatgtgctgaggctgatatagggaatcgtcctcagtcagtcttccatgtcaccttaaaggtcaccgtgtctcaatcaagctcaaggctcattgatatgattgggctttttagtcggcttactctgggggacttcttatttccacctctgtctaggcttgaattcagcatttgtttgtgctctgggaatctgaacttttgtcctcatgcttgtggggaaagcatttaaccactgaactgtcccctcagttgctttttagttattgtactattttgaagttttaatagttacattaaaatgtaacactcagaagaatgtacaaaaattaaatgcttattaagtgctttcattttcaagattttaatttttttctatattcacattttcaagacttcttaatagggcttgttttgacgttttcatgagattagaaatacttaccggcatgatttcagccatgtaataaggctttaggaagtcttcagtgtgggacttgagtgtatagtgcactgtctagtgagaagccaggtgactgtcagactgctgggccctcctctgtaagcagttttaattctctgggccttgacccccgctaaaaagccattttctctctttctcatcaagtaagaaaaaggcataggttagagagatggctcagtggttaagagcactgactgctctcccagaggtcccaagttcaattctcagtaaccacacggtggctcacaaccatctgtaatgggatctgatgccctcttctggggtgtctaaagacagctacagtgtactcatagaaattaaataaataaataaatagataaataaataaaccttctgaaatcagttttatttattaaaaattcatttcatatataccttaaaacttcttaccatttttaaattatgaatgttttgtctgcacatacgtaagtgtaccccgttttcattgaacattaaatataataagccactttcaatcctcataagtctcgatatatcttgttccttgatatcctaaaattacatgtaaaatcatttgaaattaatgaaataatgctatttcttctagacccattttattgatgctgcactcaaggctagcagtcttcaacttggcatgtccacgtccagagcagtggggaagtattctggaaaactgggaagccctagtgttgggagcagtgttttttcacacaacacatttgtttctaaacgaggtaaaatacttagtttcttgagaataagatgaacccgtgttcttcatgtgtaaaaggtggaaattacttataaagtagcagggtactttgtctcaaaaataaaattatttttgaattgttgattttatatcatttttttgttcttcaaataaactttaggttattttaaaggtttaagttacgaactacaataattcctggtttatggttctaattaatcagaaaaaaattaatttgttataaatcaaaatgcttgtaattattgtgtagccctctgagaagctagctgtgtggtcatgatttccttgctttgtcagagacaatccccctagtacagttagtgcccagtgtgctgttgggctttaggagttttaggggcactaatacaacagaggtcatgcatctctttctgttttctcttttgtcgcttgaggctgggttttagattataacccaggctggtctagaacttgcaggtgttagcatgccggtccagcatgttctttcttcagtcgtattagaatgaacttctaagcgtgagattgattactaggtgttattaggtactatccccccaggtgatagattagtattccttgccactgagaatgtagcgggacagagggatggctcggtgatcagcactgtcttgagtgcgcctggacaagacccaggttcagttctcagcactgacctggaagctaactaactgcttataattccattccagggaatccattgccctcttctggcctcatgcttgtgacgcacagatgtgcttacagccaaaaaccaacatgcatggtggctcacatccattcgtaactcgagtttcaggagatcagtgtccttttctagctccacaggcaccgtgcacacacacacacacacacacacacacacacacacacacactgcacttataggcaaaacactcacactcatacataagtaaagatcaatcttcttttgaaaactatctagcaatgcagtttttccacagatttgagagtactcaaatattatcacattgattcttaatttacaggctttatctataaagacatttatagtttccatttattttgatttctagtgagtattttttttttcctttttcttggagacggtctctttatgtggtcctggctgacgttgctatttaaacaaggttgactttgagttcagagagatatacttgcctctgcctcagtgttagcattaaaggcacgtgccaccatgcccctcctgcgttaaaggcacgtgcctccatgcccctcctgcttttttgaaagggtttctctctgacctgcaacttaacaatagggtgtttgccattttgagagctccagggatctctgcctccccacgcacatgccaccacattaacctcttttaaaatgtggctctgtaccatgcttgcaaggcaaccaccttaccatttgttctcaaaaaagcttagtttttttaaattaaaaactaatttttgaaacagtgtcttattgtgtatccctggctgtcctgaactctatatagaacaggttagcctcaaactcacagaggtccaccttactcgataaagtgtttttgtttttgttttaaagatttatttatttatttcatgtatgtgagtacactgtcattgtcttcagacacatcagaagaggacattagatcccattacagatggttgtgagccaccatgtggttgctaggaattgaactcaggacctctggaagagcagtcagtgctcttaactgctgagccatctctctagccctaaaaaagtgttttgaagttaaatttatctttattattgtgattattttgtgtgtgtgtgtgtgtgtgtgtgtgtgtgtgtgtgtgtgtgtgtgtggtgctcagtggttgaactcagggcctcaccattggagacacaccatagtcccctattgattagtttcttcctttctgttaaagtgcctttaagtgaagacacagattttgatgggcagaaatctcctttagagaccccagcacctcgcaggtttgcccctgtacctgtttcaagggatggaaaaataacaaaaagggaaagccctacagaagaaaaagaaaatatggaaatgaacagtcctaaaggtaggaatccagcaattagtatccacatgtagttttctttacgctgggaccaaatacctgacaggaagcaacttaagcaggcagtgtgattttagcccatgctataaaaagggatgcattcaatcatgggaaggcatgattgcaggaggctgcttagatgttggtcatgttgaatctatagtcaggaagctgaaagcagataggaagtgagtccaggctataaaacctcgaagcctgttcccagtgactcactttttccagcaaggctttgcctcttaaagggtccataactttccaaaacagtgcagccagctggagaggacattttcaaacacagacgcccataggggaagatccgcattcagaccgcagctcttctctggactgattgcttctttgcgtatgtttttgttattttgtgatggtctcactccaatacggcctgtagcctagtggccttgaactcatgattcttctgcattcccctcctgactactgagatacagctatgagcaccacctctggctggaccttacaatcagagttgcatgagatttgccccttgggatttaagattatgtgcctagtggtcactaaactctacttagatggctagtttcaggatttcccgtggtatttagattctttaatgtaattaagatatatatcttttttttttttttttttcgagacagggtttctctgtagccctggctgtcctggaactcactttgtagaccaggctggcctcgaactcagaaatccacctgcctctgcctcccaaatgctgggattaaaggtgtgcgccaccacgcctggtgacaggtatatataattttattaccttcagattacttaaaactttcaagaataggatttgtaataactaaaaaataatgtcttactgaacacaaagctgatcagagaatatttttttttattgcttttaggtatagatttaagtacaactcagggaaattaacatttatcacaacattcagctggaataaatgcccatatatggacttaatgaagctgaagaacttttccattttatttgaaatactattatgctcctgagccttaaaatgtagcccttctagtaaaacttaatacaatattaagctgcaggcttttattcttgggatcatttgaacatttaagtctttctttagccaagttttaagaattcagaagacagttaccacaccataagtaattcttatatattcttaaaaacaaggatgggggacattcaggtaattgtaaatatcagatgagcctttcgagccgtatatgagattaaaaaccttactctcaaactggccatggtggccacgcctttaatcccagtgtttgggaggcagaggcaggcagagctctgaattcagtctacagagtaagacacgttccaagttccaagacaagacaaggtccaagacagccagggctacacagaaaaaccctgacttgaaaaaaaaaatcaaacaaaaaccattactctctgatagagatatgtgtagactttttactcatattaatcagttttttacaactctaatttttaataagatggaaatattttgtctcccctgatgagtgtatttatgcccatattgtcttcatttcttttcaagtgcaataactgaaccccatgggttaagtaatttataaagaaaagaggtttatttagcttcctgttccagacattcaaagcatgacagtgggtggtgtctgtttgctctgattctctgctgggccatggtgtggcggaaggcattacatggcaagaaagccagctagccagagaaagcttggtcttactacagagttgctcctttgataactaatccactcgtgggatagagtccatatgacctagtcacatcccgaggacttcacatttctaataccactaatacgtaactttgagaattaactttccaacacatggaatgtagggaatacttgcaaagaaccatagtggttctagagtgagttgagtagatagtaatcataagagcttaatttagatggagaggagatgcacgggaaatggaatacaaaggagaaatgaactaatttggaaaatgacatgacagtcattttttttttctgttgtaggaaatgtaagactgttggaacaagtactgaatagtaatgagtgtttgacaagaaagactgaatcatcagatataacctcactaactcagccaaaaatgggatggaatttagagaaaagagacaggtaaaaacaagagattgcaactagtaggactagaaaaagctgttcacaatctaacattttctttaggaattcaatgacatcattgctttctaatgagaactgagcatttgaggcagtacagtgactcggagtcttccagggctcacttgcaggtgactcttgttgatgctggaccaggtgtggaatctgaattctttgtcgtgtgaacacactggagtctctgtttgttagcttagtctgttggagatttggtacgtttttttttttttctactttgaactgacaaatctcctttgttaagtgtgtgttcacttcctacctggatatcgcctctcagctacccgtgagaacctcagacctcctctggtcttccctgggcacacatggagtcctctgtgatgatagtgctttactgtgaatgcctcattgtctagatttaaagtgtctgttggccacagtgttcaatcactgagctattcgatcgatcaggtgtctgagctattacacagatatctctgtggttgaaaaaaaccatgaaaatgtttgtccttcggctcagtgtgattaggctgtgtaatgataagcctgatggagaatactcaaggaagctccaaacttgttcctcccttccatggggtgaagctagtggttttcaaggctacagagcttgggaagtgtcttacgtatgggcaagtttatacaaatatgcaagctagacctgatggatgtgcatgcccagcacttgtgaaacagaggcagacagagctctgtgagttcaaggctagcctggtctacatagtgagaccgtctctcacagaacccaagaccacatgtgttcagcttgctcctctaactctgaaccaactcctttgctttagtaaactctcgttggtctgttacaggcttctgaatcgggttttgatgagtttcgagtgttctcattgcctgtggaggggcagcttgtcaaacgctccttctctgttctctgagagcgtctgactcacagctgcttgtaagcaggagccttttctgcctttttcctgatgcacttaagtgtctctcatcagatttgttttcagcctttgagacttactgctaaatgagttaaccctttcttgttctttctgaactctggctgcttcaactcagctgttctggctcaaactcctctccaagttgactgattcagtctgactttttgctttgcttggcctcagactaactctggcaatttgttttaatcttctggctgctacttattttctggctcattctgtctactgtctggctggtcgcctgtgtctagcttgtcctctgtctacaacctccctcttccctttcctctctcttcttgtgagagttgggcatattttattctgtcagatctttctctgattggtcactttgtctgtcactcaattagacatgactttcaaacatggatacttccatctacaaactaactttactttgtttgggattaaagctgtacactaagggcgtgtctgtattccagccagagggttaaaggtgtgcactaaggcaagctgagccacaccacatctagaagtaggtttttcagtaaataacaatctcaggttcagagtgtgatcaaatatcctgcaacaatttaggaaaatcttcttgtcttttgtagcactgaaactctacattcacaaatatttccttcctctgaagagcggggaacagctcaagtacccgtgccgaagtataatgatgttgttcatgatcttggccagaagaaacaagcaagtgacatgctccaggtaaagtggccatggtgtcaaaacccataatcctgaggtaaaaactgtgaaatcaggcatgttggcacccatttgcaatcctagcactgtggaggtggaggtaattacaagtttaaggtcatcctgacatacatactgtgtctgagaccagcttgtgcaacatcacactgtctagaaacagatagtgtgctacagtatgcacacacaccccgagtaaatgtaataatgcaaacaaacagaagaaataaaaaagccattaaaacactcagaaggaagaatgggaataaagctctgggaagcgcgaactcaaatctcttccctttacaaacagctcaggcctgcactgggggatgtctcctagcaaatggccagacctgtgccaccaaccgtttctgactctgcacagcgttttcctcccctcgcgctttttaaattttcttctgaggtactctttcttagtatatagctcttgatgacctaggaattgctttaaaccaaattggcctcaaaggttagggtccgggtcagggttagaacagctgtcctaattcagggttagggttagggtcccaggcccacagctgccatgcagggatcatagcaggtgccactgcccctgtctttgcctttctgactaataaaggcgtgtgaggaggagggaaaggggtgtgggtggcccttgcttgtctagttcccagcatctagagcagcttgctctttgttctgcttccttcacaagtagagctttgattgatgagcggatgacctagcaccactcttcatttcctctctggcacaaataatgtttgtaatagtttttctaactggaaaacaaaccaaacagaagaatgccagtatcaatcacttttcatttagacaacctgaaccctagattatattgattctagtgtatgcttgcagcaatgtactagctcttctttgtattaagtattgatttgtgtgtgtgtgtgtgtgtgtgtgtgtgtgtgtgtgtgtaagcacgcacatatatatgcaacacgtacccaaggatgccagaagggtgttagatgccctggagccagagtctaggtggtggtggccacctgatgtgagtgccggggaatgggctccagccctgaagagcagtgtccactctgacccgccctgccattttcccagcactgtttctttagtgtaaagcagtcaatgtaagtttaacatagtaaatgtctgcctttcatttctcttaagataaagcaatctccagttaccttgaggctttcagatcatccgcataatcctgccttgctccagacaaccaatacaaggtctgtcttgaaagatgctgcgaagattctgagaggagtacaaaacaataaaaaagtactagaagaaaacctggaagctatcgttcgtgcaaaggatggagctgctatgtattcatttatcaatgctttagctaccaataggtgaggcaggatgtgggtgtcagatcctattaatgaagttgctagatttgcttacttactttcttttttaaagattcatttatgtgtaagagtgttttgcctacatgtttgtgtgtgtaccacgtgtgtgcctagtacccatggagttcagagatgagccccaggatctggagtcaggggtggttgtgagtgctagcacggagtactctnnnnnnnnnnnnnnnnnnnnccctcgggccaatctcttttctaagcactcactgtgcttattgcatttgtttgtttgtttttttggtttttcgagacaaagtttctctgtatagccctggctgtcctggaactcactttgtagaccaggctggcctcgaactcagaaatccgcctgcctctgcctcccgagtgctgggattaaaggcgtgcaccaccactgcttattgcgtttgcatatttggcctctgaagatgtgggactggtgtggacagacatggaggtcctgtgttttactgactgcagtttcccatttcgtttccctcctccagttcttcacagacactttccttgtaacatttaatgagtacaatcactttttgttttctcaggaggggcattggttacaagtagctttaaaactagactatatttaacggatcctggtcctattctcagtatattaaggctaatttaagaacatttccttttttctcttttgtagagagatgtcagagaaaattaggatcagaaagcaggtagatgaatggattaaaatcatttcagcagaaatccaggtatgttatagaaaaagtggaaattaagtcagttctcagaatatagcataaaatccagtttactgattgccctttctttctttctttctttctttctttctttctttctttctttctttctttcttttaaaaagatttatttaagtacactgtagctgtcttcagacactctagaagagggcgtcggatctagttacagatggttgtgagccaccatgtggttgttgggatttgaactcaggaccttcggaagagcagtcagtgctcttaactgctgagccatgtcaccagccccctccctgccttttctttttaatgtgtctattttatttagtaaactctaaacagaaaacggaattctacctgcaaaggtgttttaagccagcagactggggaccatcgattcacttaggcaaacaccaacattcctcactcatgggacagtcagttccggggatgggaaatctttcttacatccatgacgagtgcagcatatcttcagacagacatcagatcttacgttttgtgtgtttgaaggtatagagctaggcaaggtcacggttacttttgtcttggagtgcaaggcagttgctttcctccagtgtgctcacatatttactcatgtcaatagcaagggaagtgtcggctcggcttccacagccatgagcacaaaaagtgattcagcattgttacacacacgcacacgcacatatataatgcatttgtaaggaatttatactagtcactgcataacttaccaaataaaaagatgaagtgacctgtcgctgtatgccagtgagcagagtatgtcttcatcactgttaattccatgtaaatatgcttatttaaatattcaaataatgtaagtttgcatatgtcagctcagtttccttatgaactatgtgcttatttaagtttgttcctctaccgtagctaactgctgggattcgggcacctgaaggcaggaaccgtgtgatggtttcctcccacgctgccgccgcctctgggtgctcgtaacgcgctaggactttagttttaggattgctttgttcgcttctggttatgagccaggatctctctgtgcagcccatgctgccctccagctggagctttccctggctcctatggtcaggagttgcaggcatgcactgctccgcctccagccctgagttcaggagttgcaggcatgcactgctccgcctccagccctttagttttttgtttccagaaagtatttttttcatgtataagctaatattctttatttttaaagcattttgaagaactaaacaatatagtaaataaattccaatatttgttagtgttgaaagcattatgatttgttttggcttaagtaattttaattttctttgccttaggatgaacttatgagaaaagattatgaacaaaagagatttgatccaaagaatcaaagaaacaagaaagctctaactatgagtagagatattaaagccaataaccaagaaaaaacggtgaacagatctgtaattccaagaagccattatcaaaagcaaacccaggagcagtttacaagtccacctgtgaggaacttgcctgcctccggcccgcagaaagagaggagtgtaaggaacgcgcctgcctcaggccctcagaaagagagggacgaagggagagcctctcccaccttgtgtttagatgccacagtgtatcacttcctaaaagatagaaataatgaaactatgaagagctgtacaaacctagactagatttacaccatcaactgtataagattttggacctgtagtagtgtagagacctacataaaatctgtacttgcctcctccgaaggcctcttagtgtgtttttgttcttttatttttggcttttggttgctcaggagacagattctcatattttcccaggctaacctcaaacctagcagttttcccaccgtatcctttaaggaagctgggaagctagaccaggcacagcagcatgcctgacttagagctaaagctgtgaatcacagtatgtgtactatgtatgtccaaagccacgcttctcagcctgtgggctgagacaattcatagcagcaaaattacagttatgaagtcgcaacaaaataaatttatgtttaggggtcaccacgagatgaggagctgtcttaaaggtcacagtgttaggacagctgagaaccactggcctagagattatcgactgtctgttattagtcagattcattttactgaaaagcatgttccatctttttgtgtatgttctgttttagacctaaaaattacatttaatgcctaatgagttgtagacacagtactgggtatttggagggattttctttaccattctaacccagcattaatgtttttaaggccaagtaagcatggattatcaagcaaagaaatgtttaatttaatgcttgtctctagtgcttgataaatgcttcctttctgtgacattttgagatttacttatttatttatttatccacttttttttctgcatatatgtctgcacaccagaagagggcatcggatcccataggactacagttatagatggttgtgagctgccatgtggttgctggaaattgaactcaatacctctggaagagcagccagtgttctttttttttttaatttatttatttattttatgtatatgagtacacactttagttgtacagatggttgtgagccttcatgtgattgttgggaattgaacttaggacctctgcttgctctagttaaccccacttgctccggccaaagatttatttattagtataagttcactgtagctgtcttcaaacgcaccagaagagggtatcagatctcattatgggtggttgtgagccaccatgtggttgctgggatttgaaatcagtacctttggaagagcagtcggtgctcttacccactgaaccatctcaccagcccgcagccaatgttcttaatcactgagccatctctccaatccatttctctggcattttgattgaaagtggagcctggagtatataaagtcatttaaagactgtttattgtatttaaacataataattatgtaaaatgtatttaaacattactttaggaactgagaatattcatagtaatgtaagaccttttatgtttcctaggtggaagattttaatattttacagtaattgtaacatgttttgcattggtagggcctcttgaagtcagccacaacgttgcaagacgaggattatatgttacagatatatgggaagccagtttatcagggccaccgcagcactcttaagaaaggaccgtatctcagattcagttctccgtctcctaaggccaagccacagaggccaagggtgatagagctagtgaaaggtaaggaagttcagtgcctgtcactgctccatttacagagaggcttagtgcatagcatggctttatgtttgttatctgtgcgcagcactcagtgtctgatgaggagcgggaggaagaagagcagagcttcagtaccgttatctgccagggaacagtgtttgtgggcatttttgtggtttgctaccaaaaagtcttcgccaataaaaatgatcgatttttttgttggcttttaattaaataagaacattttattattatgtgttttgactcaggccagccatttctttgatatatttgaatatgacttagttaaataataagtctgttaattttggttacatttttaatttttttgtccttctttgaagttagtaagcttcactaacaggtagttagcagataccaagtctctgaagttagtaagctaactagcaggtaactggtggataccaagtctctgaagttagtaagctaactaacaggtagctggtggataccaagtctctgaagttagtaagctaactagcaggtagctggtggataccaagtctctgaagttagtaagctaactagcaggtagctggtggataccaagccacttcctttcctcctagaggtggagctgtggcaggcagttgctcagacccccttcctttataaatgctggctgatcaggctggtgatccacttacctgtaaatcctacagatactattataaaggcatgcaaattatgatgtttgccctaatatttttcttaaatactggagatttattgttaaaattgtatttggagatttgaaagcctttccaaaacaacaactttacaacactgtcagatccccaataaaccttttaaggtaacagtcagtgagagccagtgggcccttcatccccaagcctggtacctgcggtttctcccctctgtgggagagaagaagtccttcttctctagagacacagataagacagacttgaagttctcttctgcttacttgttaatttggtttttgttgttgttgttttgtcttttttttttgaaaccagatctgtttttgtagtcctggctgtcctgacactaaatatgtagatcactctgtccttgaactcacagatttgcctgtctctggctcccaagtgctgaacttaaatggtgtgtaccccaaattctggctggttttttttttaagatttatttttatttttattttcatttatgcatgtgtgtgcccatggaagccagcagaggacatctggtcccttggagctggaactgtgggtggttgggttgtgagtgctgggaatcaaactcaggtcctctggaagagcagcagtcactgtcagccaccgggtcatcttttcaaccctcaattttgtttttctaaagaaaggactttctgtagtgtacccctggctggcctcaggcttacagcagtcttcctgcctctgcctccttccgctgggccattatgcctgacaaacttttaagattttgataatttagagtataatgtctatatggatctacataaaacagattaaaaaatatatactaacttccataaattctaagtaagtatatagaattagattaattgtgcatactttcaaaggataagggctgattattcagaatatagaacaagcaaaggtataatgagagaattgggggaaatcctgttctaaaatatgacctttaactttcttgtattgtgaaggatagttggtgagtttagagagatgttcttcaacatttttcttatatcagagtagctctgtacaagtgtatcagggacagacagctgtggtttacaggtgagctgctgggtttttttcctttctccttcatcttcctcttcctcctcctcctcctcttttctttttttcccccttgggcaaagtttctttatgtgtccctggctgccctggaacttgctccatagaccaggctggtctcaaactcagaggtcctcctgcctctacttcctgagtgctgggatttaaggcgtgcgccaccagcaccttagctgctggcttttgtttttgttttgtttttttgtttttgtttatttggtttttcgagacagggtttctctgtatagccctggctgtcctggaactcactttgtagaccaggctggcctcgaattcagaaatccaccctgcctctgcctcctgagtgctgggttcaaaggcgtgtgtcaccacgcccagccttagctgctgttttaatgagtaaatttttattgactatagccaggttcatttactgttcatggctgctttcatgattgtcaccagagttgaacagttgcacctgagattacatggtctaagttagaccaaagtaattcctgtctggccaacctctgatctacgtagtacttctgcttgagaccctatattaaattggatgaaatcttactgggaaaaacaattgtatttctaggtggctagctaatagatcgttgttgaattttaaatttctgccaatgattattattataggcactaaagtcaagtcagcaaaaacacaaactgactttcatgctgcatcacgtatgaaaatggattctaaaatacagcatcccatcaccgcactacctcatgctgatcagcagtatatggtcagcccaagcagagaaatgcctactgtttcaggtaccctggaaggtcatctaattcctatggcaatcctcttaggtaagacacaatgaatatgtggctgtagggaagggggaggggtccattgcttgtgatcagtagcaggagttataacggtcacctactttcttatgtctggagagagcttcagaatgtaggttatgcagggtaacagtgatctcttaaacagtgagttcttgccataatctcatttataggaaatattctcttggtgtattgctatagatgacatgattgacatgccattgacctacataataattgaagaagtcaagtttgtttgaatattgtcatgcatgaggagagatactttgaagcactgttatgtacttttaaaccaggttgtgataagtaaaagctagatgaccatatatatactaggggaaatggtcgcttatttcctatatgagagctctaagggtcatattaaaaattggacagctctgcaggtatgaaatcacatacctagcatccctttcctcagaagcacaaggcaggaaaaccacatgactggatgctaggaacagacccgcaggctctctgtaagaacagcaggtgctcttaaccgctgagccaccccttcatccctgagtacataaaaacgttatatttttatttgtgtgtttgtgtgtgtgcctgtgtgagtttatgtgcaccacgtgtgttcaggtactcatgaaggccactgggcattcggttccctgaaactggacttttgtaggtaggcaagccacctgatgtgggttctaggaactgaactctggttctctagaagagcagcaagtgctctgaagttctgagccatccctccagtccatatatatggaaatacaaattaaactacttggagatacattgtatatataatatatatacatagtatatatacatatacatatgttcacacacacacacatatggatgagtgtatatgtgtgtgtgtgtgtgtgtgtgtgtgcccaaagtagttttagtttttatttcagtgatggctagacatatggagtgctttgaaaaacatgatcatctctctctctctatttctttctttctttctttctttctttctttctttctttctttctaactttattcagttatttttctatttgttaactagcagttttatttccttggtatttaacttctgcagctcttggtaaattctgaatatcagttcagccctttgtctgaggtgtagctggtacagatgatgtcccgggccgtgggccgcctgtgctctgctgaccgtttcctttgctgagcagaaacttgactttcctgtagaccatgtgctggtgcttggggctagtttctgtgcggttggtcctctactgaaaaagttctgttgggggctggagaactcagtggttaagaccactaggttgctcttctagaggacccaggttcaattcctagcacccacatggcatcttacaactgtctaactccagtcccagaggatccaatccctcacacatgcaggcaaaacactaatgcacattttttaaaaaagagatgcattttcctcagtgtcttgaattgtatcttctctgtgtttttttcctcctcctcctcctnnnnnnnnnnnnnnnnnnnnnnnnnnnnnnctcctcctcctcctcctcctcctcctccttcttcttcttcttcttctagaagttgcagtgtttcaggttttaaagtctttgatccatttgaaattgatttttttatgaagtgaaaattacaaatctaatttcattcttctgcattctgcattcttctgctgtagaaacacagctttgccagaactgtttgttgaacaggctgtccttttccacatacatttttgcttcctcctttgtcaaaaattaagtgagcatagccatcttatttttgggtcctctctcccatttcattggtttacctgtctatttttatgctaggatcaatcaggctgtctctatcactatgtctctatagtataatttgagattggacaatctatagtaatatctccatagtgttcttactccataggattgctttgtctattcatgatcttttgtagttacaaatgaattcttgtattgtcttctctcaacctgtgaaatatgacactggaatttgggtaggtattgccttaaatctgaaatgaattttggtagaatagtcatttttacaatattagttttgccaatccaagagcacaggatatctttctatcatcagcatcttctataattacctttttaatatcttgaagtttttttgttgtagaagccttttcactttggttaaatatattcctcaacacataatgttttggagttattttgagtgaaatatttttcctgatttctttctctgggagtatattgttagtataaatgaagactactatgtctgtctgtctgtctgtgagacagggtctcatactagacgatgttgaccttgagtcaccatgtagcctaggcatctgagtgctggagttaagggcttgtgctgtgtccttgcacagcctcagggacttgggcctgactggcccagcaagagaatgaagagaagacaggcagagggcatatacagaaaagctgggatccagtgggctgggctgtgatgcagagacctctacacctaggaggctccctgtttattacatacagttgaactaagaggctggggttactgaatagacctcaataaagaggaagggttagtacatacagagaaacaaggagacaggtttagttaatcttgatttgttccatccctgtagtggaggatacacccaggggacatgggaggagagagctatggtggatattttctccacaaactgtctgcatttccacttggaggaggagaacagcccttgacctttcctcagccttgccaggggaaggctttgccgttttcccatgaggctgaggctttgaggtccttgaaatgactgtccctctgggccactatgtccagctccttagtctttacttcaaaatataaaaaacaagcagaacttttgaaatgagacctgacagtatagagtatgctctaataggcagatactaacctttattttaagcattaagatagcgtatgtgaagtcggaattgcatacaaataatgaagagactgacatggtgggcacatgtgtagaccgtggtggtgaggagcgaggaaattgcaagatgcctctttccttttgtgagcaagaccagtcacaaagatccaggcagtcaatttgatttttccttttatgttagaaacagctgactcattctgtgccctacatttcataggacaaacccaaagcaatagtgactccatgccacctgctggagtcactgtaaacaagccacgccccgtgactgtgaccacttctattcctccggcatctcgaaaagggaacgctggagtcaagaaacccaacgtagccattgtagagatgaaatcagagaagaaggaccctccccagctctctgtacaggtatgccagggtgcacgagcagacccaacagagcgcggaaacccatttacgccatgagaacccacagttcattgcttaactttatgaagaccttgctttcactgctttattggtgtgacctggtggtaatgtggtgtcgctatgcttgctctgcagtgtttaccctcctaagtcagtgtccatatcacagagcggggaatgggtgaacaatgcgctataattaacttttaaaaagaaggtatgtggggctggagagatggctcagcggttaagggcactggctgctcttccagaggtcctaagttcaatttccagcaaccacatggtggctcacaaccatctgtaatgggattcaatgccctcttctggcatgcatatgtgtgtacagacagagcattcatataccataacaacaaacaaacaaacaaacaaacagacaagtagatgatacatacctgtagtctaagcacccagaaagtagccataggaagattgccacaggttcaaggtcagcctggtccatctagcaggtttctagccagctcgttagggctacacagagagtcactgcctcaataataaataagtgaataaataaaccaaaacatacaataaaagaagcaatagttaatggaaggtgtgactaatatagtcattatttcaaactttatccaatcataggacatgaatgaatgtagaaagaacccatttttatacacaaaaactattcaagtttatgctctttccaatttaatgtgcaattttagtgaaatgctatttgttagaaataaacatgagattttttttcttgaactttagggtaattttgatatctggaagaataaagggtttagaaaagagttttgttatgagctgggcatttggcttatttgagccaacattggagaggtagaggttgaaaggtcaggagttcaaggtcatccttaaccccaggtcaggttcagggccaagcagcataggttatgagacaccacgctggttactagaccagtgcagtgggatttcagaatcagctttattattcagaaagaatgtatacatggtagagatttgttataaggaaaaaaatgtgtgttgtatttgtcttaatgacataagaaaagattagttttatgcttcaagtttttctgtgtagcaaatgagctccaaattggctagttgaaattataaaaaacaaaaccataaaaatttgaacataatttcattgacttttattaaaactgaagcaaattctggattttggggaagatactttaaatacagtaaataaaggaaaggagggttgcatctaaaatctaaaggttctgtatgtcaaagaaccttacaaaggaaggggggcttcagtgagaataaatgaaagcaagagcccaggaaaggatttgtttttaaatacaaagacatctttatgccataagaaaacatagatctaagtccagattttgtccaggtacatgagtgagattctacaggagggttaaaagtatatttaaaaataaggaaattagatgtaagttttccttgtagctaagataataaaattttttaaaaggataatatattcccatgtaattattgctattataaaactgctcattttagttgatggttggataaaacttagaattatgttttttgatgatgtaaacagaaattggataggattttaccagtaattacaaagagtattgaatattcatgctctgtgggcccagaagttcatcaaaatctatctaatatgctatagtaactcaaggcttgagaagaaaaccctgcatatatgaagatactgggatctaggtgtgacagtggggacactggcagtgaggaatggctgaataaggaatggaaaatcctttaatattacccagttatgtaaaagtataacgtctgcagagaaacaggatatgactaggtaataatggcgcccccttaatcctagagcttgggaggcagagacaggcagatctctgtgagtttgaagctagcctggacgatagaatgagtttcagggtaaccaaggccacacagagaagccccgtctcaaatgatcaaaacataaataaaataaaataaaataaaataaaataaaatgaaggaggaggagaatgaggaggtattatgacctaaaaacaatgaaaactcagggttgagaacactttaacttgcttaaacgggtgggaaacagagacgagtataggtcatggaagtgaagttatcttaagatagaattttatcagttttttttttcctttaaatgcttagtataatatgctttcataattcaaagtatctgtttatgacaataaaaatatgaagggcatattttgttgtctgtttttgatagttacttaagtcatagtggtaaacagcaagccagatgttctgttctgttctgttgtagatattacctagtgtggatattgatagcgtttcatacagcagtactgacggggcttcctctccaccaagtcccaaagaagcctctcttcctccactgcacacctggatccaggtaggtttcagagttctttcatagcattaactattactccatgcagagctcttatcatatcataatgtattatagtggatgcagtagctcatactttgaagcctagtacttgagaggcaaaaggcagtcagacttctgtgagtttgaggccagcctgttctacagagttacagccatagctatgtatgtcataatatgtaacaataatttcagcatatggtaaaatcgaaatgagggttacattgtttacaaatttctaaagacgttgctttgagatctttataaatattcaggacatggcaatttttggagtaacatggtaattgtgagactttcacaggtgaagaatttctgtgtctttggtaatatttgatttatatgaaaattataaattggaatgtgaaatttttatacatttacttattgtgtgtgtctgtatatgtgtgtacgtgtgtatgtgcgtgtgcacctgcacatgtgtgcatgccacagtccacatggggcatgaggtcagaggacaactaatggggagtctgtttttccttccagcacatgtgaaagggttagactcaggttgtctggcttggctgcaagtgtttttacccatccagagttaggattataatactgataagtagtatatattttgtcacattgttaacatataaaaatatacattttcttgtattaatttgcttctgaataatgataatatgacttttattacagtaaaatagcactgtaacatatctctggtatctaatatatcaaattgatcatggagttcatagttcttaagaataaaaaacaattgctggacatgatgtcagaataaggcaaatgtctgtgaatctgaggtcagcaacataagggctacatgatgagacctcagctcagaatgaaaacaagcaaaccagaaaccaaagtcatgaatcagtcgggcacagttctcacacctttaatcccagcatgtaggaggcagagataggaagatttctgtgagtttgagccagcctggtctgacacagtcagatctgtcaaaggggagcagggctgaccgagctcataaagctttcatgattctgagcactgtgttagaattgatcctaagtggaattcatacccactcgaactagttaactgtttataagtaattttgtttttcttaggagtttattggaacatgtatgataacaaaaatatattttgaattatgtataattgttctcagcaagaagaggtgccccttccaggaactaactttgatgccatttttagtaattagagtttatatagtaaggcctagatagtgaacttgaatataatttgacttttattaagatttttaaaagacttattcatttcttaaaattatgtgggggcctgtgtgcggctttatatgcatcaggcccatgcaggtgcccatataagccagagggcactggattcccttaaactggagttacggcagttgtgtctgcctggtgtgggcatagtgaaccaaactgtctctgagagcaacaagtgcttgtaacctgagagacatcactccagtctgtctctttttaacttaaaataaaacttttatttggggagtgtgtgtgtgtgtgtgtaatgcatgtgcatgggtgtgtgaatgtagaggtcagaagacaactttcaggagttctttcctaacgtgtggttctcagaatcacactgggtcatctggcttgttgacaaatataagccaggtaaagccatcttgtgagccctggttttctttacttttaaaatgatcggaatctgtttctgtcttttgtgagtcagtgaatgtatatacttacagagctacatgtggaagtgtttccttcagggtgtaaaactagcctgttgatagttctttacatttctcactgcagtccggagttagggctcagtgggtaagagcacttgcgcctaaggcttagcacctgagcttaatccctaagacccacatgataccaggagaaagctgacctgtattagcctttgaccctccacacggacgctttgatgccgctgtggatacacaaaataaaataaagaaatgtaagcttcttcgcagttgtgtttgttgctgtagattaaatgtcagactggtattgtgtttgtctctcactgtggcccagactatcttagaactcagagcagcccttttagctttaaacttccaggacttttcctgccccaggctcctgagttcaggaattaggaggtatgaaacatattaccctgataatttaaaaaagatatttttattgaaaataatttttggctaggtggtggagggcgtatgtctccaatcctagcactcaggaagcagaggcaggcaaatctctctgagttctaaaccagccttgtctacagagcaagtcccaaaacagccagggttatacagagaatccccgtgttgaaaaaccaaagcagcaacaataacaacaacaacaattacatacatatatatatatataaatttttatcatttttgaaatgacgagataatagattgaggactgacctgtatctcatttactaattaaatcacttctgaacagaatattaaagtagcagggctatattaagattatagtgtatgggaaaatataagaaattatatgttttaaaattgaaggcagtaaaactttctgaaatgtttccttagactccagactttatgaaggtggatgaagaagaggtgccccttccaggaactaactttgatgaagtaatcgatgttattcaggtaacaaagcttagagacatagaaagtcatttccttacaaagacttttccaggtggttgaatggattttgactattacaactaagtttgagaaacatgactttactttgatttaaatagactttaaaatttaaatatgcttatttaaatttcttttaaaggttatgaagtttgttaattgtttttcttccctgtagtgtcgtgtttttgtcataaacttaatgctagcccactgtctcccacctggaacacgcctgttgctgccatctctccagcttcccttcctccagtccaatctattacatttaactcttgatttccagaggcaaagttaggtttgtatcggggaaaagttatgaatagtcagaagtccaagggaaatcctgtatggatgtcagttatgaaaaggcaggaaagaaaggcaggaaacataaaccacatgaaaaatggagacacatacgagattattttaatgttatgaacaagacattcagcattagcgaaaatacttctcacatttctttgactttgttatgaaaactgagggactggagagatggctcagcactgaatagggattgaggctctgagaggacctgaggtcagttcccagcacccacgtggtgaccccagtgcagaggatccaacttcttctgacctctcatgctgaacacatgcttacactctctctctctctctctcacannnnnnnnnnnnnnnnnnnnnnnnnnnnnncacacacacacacactcacacacacagaattagcacatacttgaaataaaatgtaatccttagaccatgcagaggtaggcactgtctttgtgttggagatgcgtttccctatgtgagtgctgtgcagtgttttgaggctaggctccttctttgtcttcatagccctaatgctgctgctgtttaatagagttggagttcaagtggaaggagcgactacagaactcacagtggatttggggctgagtgacaagggtctcttctattcctcacaggatattgatgagctgtgatatttaaagagactagataattttgaggtgcttatttaattatagataaatttatatctgtaatttaggtcacaatgattatgaaagagaaaatggatggtggataacttaggtggcaaagttgaccatgagttgataattgttgaagctggggactaggtacatgcaagtcatttatataaaatctgtagtacctaagcattactttatttatttttaaacatgtaacattttccataaggaaaagtaaaaaaaaaaaaaaaaaaccagagcaattactttgggatgtgatatgatgatgaaagttatgtgtaagataaactaaatgtaaattgcaggttctgacagggtgaacaaatgtttgggattattgggggtggtggtttgtgagctcataaaattttggatatttcataaggttcaatgctccccaggtgttctagcttcatgatgatacaaaatttatatatatatatatattttaatgttttgtgtctggtgatgtgaaatcaaactcagggtagacgagtgttctaccattgaaccatacccagagcctgaacactgagtttaaaaaggacagattatgaaaaatacatgttctccagtgttgtctaactcatgtctgtgttgggacaagtgtaatatgtacggcatatttaatgtcatactacctaaggaaaagggttattggctggtttgtgaatgttggttaattcatacagctgagttctttgtctatgcttgccacatgaacagatacttgaagataatcgttttgttttcattgtgttaccaggaagaagaaaaacgtgatgaaattcctgaatgctctgcaccaatgttggagtttaacagaagtgttaaagttgttcctacaaaatataatggtccttcatttcctcctgtagtttctgcttaccatcccactactgatattttagataaagtaattgagagaaaagaaacattggaaaatagtttaattcagtggtaagtttataattctattggtgtgaataaaatcagaagggcagataaaaatggaaatagcttagaagaatattcagtgagagtgaaaggtagtatcctgaggtataagtacagccagagacacagtatacgcttagctttgaaaaccttaagataagtttgtgttgaacagatgttggaaatatatgtcaattaagtttgtgttgaacagatattggaaatatatgtcaagtaattaactacttacctttgaatctaggattatgagtgaattgaatcctgtgaattaaaaaaataataattttctgattttcccacagtaaaaacttaccatttctatgacagtaatttttgatatgactatccgctactctaaagaaatgcattgaacgaggcttctactctactctttgcttttcttttcctcttccaaacagtgacttatgaaatacatttttctttacttttcgaggaaaaaatttaccctgcttagcagtttgagtgtttatgattttattgagaggagagcaggagactctagtctttaaaaaaaattttaaatcaagttgcatcactttaataaactcacaactaaagcggcggatggctagtttaaggatgctgtttaagcacttgcctagtcccagactccgctcagtgactgtcattggagctttggtctgatctgttagctatgtgtgctccgagtgagaagcagcccgctcacccgagtgagaagcccactcacagctgtcaacacaaacggtgtgcttacctagggtgagtgcagggagctttctgtcaggccgaagagctcaaggttgatttcattgtctgcctcccaaaaggacagtttcgtccttttggaaaggagacaagttctcttccttccagctgtaagttccagaaggctgcttttgcatgttcatctatgagtacagcttattctttaaagtgatatagcaaacattttatacttttaaccaaattcaggtgtatttaactttatacttctagggtagaacaagaaataatgtcaagaattatctctgggctctttccactccagcaacaggccagacttgatgccagtgtctcagtaagtgaggcgagcgaaccgtcagcttctgacattggtacgtcagagggaacctgttgccacttagttactgaggatttctgtatccttggctgtctcactttctgctcctctgcagatgagattagtattcctttccctctgtttttacagattgcagctttggggttgctgacccattctctaggattctattgttcctccacagaaaaatgtctgtgtctgtgtataaattatataaaatatattatgtaatatacatacatatgtgttattgtggaggaacaatagaatattgtatgcatgcatgccccggtcagagacaacgtgggctccaggagctcctcaggtcatcagctgggtgcctttacccactaaaacagctttctgccacctccttttatttttcttttgctgcaacctaatatttagcaaaggggactttatacaggaaagatttattttatgtgatggtttgagagaatagcagttcattgtggtaggaaacacatgccagtcagagtgtgctgtggctggctgtttcctcactgagaaagcttgggaccagtgagagtgtgctgtggccggccacattgtcactcagaaagcacaggagtataatatagttggacacattgcatccttagaaagctaggagacataactgactcatatttaactcttttctcttttgagtaaagtccagagccctagtacaagagatggtgccagccacataggggtgggtcttttcctcctagttaaatctctctagaaatgttctcacagaatgtccagaggtgtgtctctagtcgattccaaagtccatttatcatcagcacacatttataataggtatcaatatagtacggttgtctgacacgtctttcttactcactagactatgcattattcagtagtcaggatgctgctgcttttgcccagcccttgagggtttaagttctctctgagtggttaaacgagccattcctctttccttcttcttcctggtgatttccagccttttaattctttaactattgtgtactaaaaacttcattcttttcactgttctgtgcatcattatgtgctaaaaacttaactctttattactgttttgtgcttcatgtaagtgctggggaaagtttttctctcttattatttataattctctgttgcttgaataagcagtggtaaacttaactcttacattataaacttacagtatattctctggcagtttacatatcatgtacagcaacagggaattcagtagaggatttgctaaggctcctttcctttctctcttgcctagaaaccttgtctgttgctggccagacaagaaggaagcgtggaacagttaacttttagtgaaccaggaaaagaaagtcatgctcacagatagaaaaacctttacacaaaccaatatgcatagacacacacattcttatacacattcaccttttgttgggcacaaccatctcatcaacttacatacacacacatcttccttcaaatgcgtatttgtatttggtggctagaacaaaagtccccatgagcaggtttcattgagcaggcgccagtgcagaaaaaacacactcattctggatgaaaaatacacttcaatctttattgattagagaaagaaaaaacaacttttttattgtttataaaaaagccctgttcttgtgagtaagaagaaactggctgtctcatggtgagaagaagcctgcctgctcctgctgtgttgtgctgtgcactgctcagctctgcttcccttctgctcctgctcttattgttatcgttcctggttcttgtactttttcaaggcacatgatcacatggtattctaagcatcttttttcaaagttcacgacaagttcaatcataagttcaaattgaaaattgaataagaagtatctcgccgggcagtggtggcgcacgcctttgatcccagctcgggaggcagaggcagaggcaggcagatttctaagttcaaggccagcctggtccacagagtgaatcccaggacagccaggactacatagagaaaccctgtctcaaaaaaacaaaacaacaaagcaacaacaacaaaaagactagttgtcttatttagcattcattatctgccactagctccacaggtttattaagaatttaaaatgataattcctatgtcaaagttagcacagttttgtcaagaagcaaatcatctgcctaggagctcattagttggagttttgtatagatcaatccagtcaatgttttatcttctgtctttgcacctacaataaatcgttcactctcagttcatgacctttagttatcaggtaacggttttacattcagcctagaaggaaggttttccctggtcataaatctggttcaagcctgtgttctatcctagtgcaatgagcccatgacaggtgaagatttacacaaccctaattgcagctttcctattacagagggctctatagaatactacaggaattctatagaataattataaaatcatcaatttatagcattgttacagaagagtatatctttgnnnnnnnnnnnnnnnnnnnnnnnnnnnnnnnnnnnnnnnnnnnnnnnnnnnnnnnnnnnnnnnnnnnnnnnnnnnnnnnnnnnnnnnnnnnnnnnnnnnnnnnnnnnnnnnnnnnnnnnnnnnnnnnnnnnnnnnnnnnnnnnnnnnnnnnnnnnnnnnnnnnnnnnnnnnnnnnnnnnnnnnnnnnnnnnnnnnnnnnnnnnnnnnnnnnnnnnnnnnnnnnnnnnnnnnnnnnnnnnnnnnnnnnnnnnnnnnnnnnnnnnnnnnnnnnnnnnnnnnnnnnnnnnnnnnnnnnnnnnnnnnnnnnnnnnnnnnnnnnnnnnnnnnnnnnnnnnnnnnnnnnnnnnnnnnnnnnnnnnnnnnnnnnnnnnnnnnnnnnnnnnnnnnnnnnnnnnnnnnnnnnnnnnnnnnnnnnnnnnnnnnnnnnnnnnnnnnnnnnnnnnnnnnnnnnnnnnnnnnnnnnnnnnnnnnnnnnnnnnnnnnnnnnnnnnnnnnnnnnnnnnnnnnnnnnnnnnnnnnnnnnnnnnnnnnnnnnnnnnnnnnnnnnnnnnnnnnnnnnnnnnnnnnnnnnnnnnnnnnnnnnnnnnnnnnnnnnnnnnnnnnnnnnnnnnnnnnnnnnnnnnnnnnnnnnnnnnnnnnnnnnnnnnnnnnnnnnnnnnnnnnnnnnnnnnnnnnnnnnnnnnnnnnnnnnnnnnnnnnnnnnnnnnnnnnnnnnnnnnnnnnnnnnnnnnnnnnnnnnnnnnnnnnnnnnnnnnnnnnnnnnnnnnnnnnnnnnnnnnnnnnnnnnnnnnnnnnnnnnnnnnnnnnnnnnnnnnnnnnnnnnnnnnnnnnnnnnnnnnnnnnnnnnnnnnnnnnnnnnnnnnnnnnnnnnnnnnnnnnnnnnnnnnnnnnnnnnnnnnnnnnnnnnnnnnnnnnnnnnnnnnnnnnnnnnnnnnnnnnnnnnnnnnnnnnnnnnnnnnnnnnnnnnnnnnnnnnnnnnnnnnnnnnnnnnnnnnnnnnnnnnnnnnnnnnnnnnnnnnnnnnnnnnnnnnnnnnnnnnnnnnnnnnnnnnnnnnnnnnnnnnnnnnnnnnnnnnnnnnnnnnnnnnnnnnnnnnnnnnnnnnnnnnnnnnnnnnnnnnnnnnnnnnnnnnnnnnnnnnnnnnnnnnnnnnnnnnnnnnnnnnnnnnnnnnnnnnnnnnnnnnnnnnnnnnnnnnnnnnnnnnnnnnnnnnnnnnnnnnnnnnnnnnnnnnnnnnnnnnnnnnnnnnnnnnnnnnnnnnnnnnnnnnnnnnnnnnnnnnnnnnnnnnnnnnnnnnnnnnnnnnnnnnnnnnnnnnnnnnnnnnnnnnnnnnnnnnnnnnnnnnnnnnnnnnnnnnnnnnnnnnnnnnnnnnnnnnnnnnnnnnnnnnnnnnnnnnnnnnnnnnnnnnnnnnnnnnnnnnnnnnnnnnnnnnnnnnnnnnnnnnnnnnnnnnnnnnnnnnnnnnnnnnnnnnnnnnnnnnnnnnnnnnnnnnnnnnnnnnnnnnnnnnnnnnnnnnnnnnnnnnnnnnnnnnnnnnnnnnnnnnnnnnnnnnnnnnnnnnnnnnnnnnnnnnnnnnnnnnnnnnnnnnnnnnnnnnnnnnnnnnnnnnnnnnnnnnnnnnnnnnnnnnnnnnnnnnnnnnnnnnnnnnnnnnnnnnnnnnnnnnnnnnnnnnnnnnnnnnnnnnnnnnnnnnnnnnnnnnnnnnnnnnnnnnnnnnnnnnnnnnnnnnnnnnnnnnnnnnnnnnnnnnnnnnnnnnnnnnnnnnnnnnnnnnnnnnnnnnnnnnnnnnnnnnnnnnnnnnnnnnnnnnnnnnnnnnnnnnnnnnnnnnnnnnnnnnnnnnnnnnnnnnnnnnnnnnnnnnnnnnnnnnnnnnnnnnnnnnnnnnnnnnnnnnnnnnnnnnnnnnnnnnnnnnnnnnnnnnnnnnnnnnnnnnnnnnnnnnnnnnnnnnnnnnnnnnnnnnnnnnnnnnnnnnnnnnnnnnnnnnnnnnnnnnnnnnnnnnnnnnnnnnnnnnnnnnnnnnnnnnnnnnnnnnnnnnnnnnnnnnnnnnnnnnnnnnnnnnnnnnnnnnnnnnnnnnnnnnnnnnnnnnnnnnnnnnnnnnnnnnnnnnnnnnnnnnnnnnnnnnnnnnnnnnnnnnnnnnnnnnnnnnnnnnnnnnnnnnnnnnnnnnnnnnnnnnnnnnnnnnnnnnnnnnnnnnnnnnnnnnnnnnnngcttgctccttccactgtggttccagggggctgaactcaggtagtcaggcatggcagcaagcattttttacctcttaatcatcttgcctatcctagtgcaatattttgccaatcatgttcttgcttaagttagtattatttgctggatatatcataatttgttaatccagttaccagatggttgatatttcctgtcttttagtttaggtctatggtaaaactgataagaatacttgctgacaattttttgtttggaatgcagcttttaatttatcctagtcatgtgataaataaatggttattaggacttgctaagcatcttgcaaatggtggtaccatgatatcccaagcagtactgtggttcttatttgcctgttgagaggaatatgctgagtagtgatggctagccggatctaattgcgatataaaggctttctttatctgtgcatgcgtgcgtgcctgtttgtgtctgtgtgtctgtgtgtgttcccaggaactgaacccaggacccttgcccaggctaggctagaactctaccattcaacgactccttcaacactcatagtatgttttgaggtatattttatatgcaatataaaatgagaatgtaaaacgctcttcattttttctttattctttctccttttgcatatggatttcagatttctgtagtattctttaaaagattatcctgtctccattgaattatcttaatatttttattgaaaactaattggccgggctggtgagatggctcagtgggtaagagcacccaactgttcttccgaaggtccagagttcaaatcccagcaaccacatggtggctcacagccatctgtaacaagatctgacgccctcttctggagtgtctgaagacagctacagtgtacttacatatagtaaataaataaatcttttaaaaaaaaaaaaaaaagaaaactagttggccataaatctgtagatgtttctgttcttccttttttatttaattttttaaatgtgtgtgtatgtttgcctgcattgttttatgtgcaccacatatgtcctttttaaaaaatacttcttcttcctgtctttccactcttgggatagcctgttgtcctttacagcctgacttttacttcccaagtcctgcagtagaagcttcaggaggctcagcatgcgacgtcaccgaccagtgtccttgagctagagggagggagagcttgcctcttgcttaatgtatccttgtgttttggtcagaagtagaaataggattgttggggggggtatgggggacttttggtatagcactggaaatgtaaatgagctaaatacctaataaaaaaatggaaaaaaaaaaaaaaagaaataggattgtttccagctgaggaaatttggtatatatgtaatagttttcattgacttctgtgtggtgaggaaggaggcatattacatgaatttttacttgtgttttttttctctgccttggtttgttagaaaggatgctatttaagctgctatctgtctttcttgtggccagtagctttgcttcgcttctcagtgttcacgcctccttcacgatcacacatagctatcagcctcctaagatcttaagatgtaaggtgtggctgcacccatgtttcttggcattatctgaagttcttgttttttagttgcaggaacaagcagtggagcgctccagcgtatggttgatgccagagttcctgtgaactcggacatggtcagccattttgtcaatgaagctctgactgagaccattgctgtcatgttagctgacagagaagcagagaggcaaagggctgctgccacaagtgttcctggtgatctttcaggaactgaaactaacctgttggtaggagtgactttccgttcccttgtgacctaagggttgtggagaatatcttagatattctctgtgtgtgtgtgtgtgtgtgtgtgtgtgtgtctgtctttccatctatgtttgcttgagacagtctcaccctatagtccaagctgtctctgtagctcagggtggtctcaagctcaagataaccttcccacttcagtatctatgtaaaaatgccactattctatgtagaagctagcacatctacatacaagaaggtattttaaacttaatgttttaagagcatagattgtgatagaattccttggtgatgtaattaacattcccctagttgtttattattattattattattattattattattattattattattattttgagattagctttcttgtagccccaggctggccttgaagtcactgtgcacctgagggtggccttgaactggataactggattcaagtatgagctatcatactcaatttagctttttccttttttttttttttttttttggagaaaatgtaaaatctacagaaaagttacaagtgtattacagtgaccagtgaccattttttccctgtatttactctctgtatttcacactggtggcagttgaacgtttctaaagtctatctctatacatgctatatgcttaaaaaaatattttaagcatatgagtgttttgtctggatgtttgtctgtctgcttcttgcatgcagtacccacacaagccagaagaaggcatctgatctcctggaacagagagataagtttccatgtgggtgctggaaattgaacccatgtcctctgaagcaacagccagtgcgcttaactgctaagtcatctctccagccctatattatattctttttaaaaaaaagtttgagagttgggaatatgtgactctacctcaaaagcattagcagcattccctaaagaaatctttgtggtttacaggctcagaaatagctgcagagttttataaagttggtaacagagttaattttggatttgtatcattcctacgatagattagaaattctattcaacatagtgatggtgatcacacaaacaataatccaagtatataaaatacattttctcttaaactagtaaagaaggtgtctgtagactctagatactaaatatgtgtgtgacctgaaggtacaaaagatcctcagtgagaagaggaaagtcagcggtctcagcacagagtgggaggaaggccgagtgaggggatggagggccggaatgtgagcaaagcaaaccgtttatgtgtacgaagtgtcctagcccgttatttctataggtttactgaaaatgattaataaaaccagattttatagatataagtctaattttgatttgtataatttgggaaggatagacatcttcatgatgctaggtcttcatcctcatcctcctcatcttcatcatcatcatcatatagtttcatggatgattaaatagctcatacaacttatagaactttgtgaatactcagttcctaatagtttatcattgttggtagtcagttaccagtgcttgaaggatacctccagacctctcatgaggaataaggtgggccattttatttgtgcgtgtgtgtgtgtgtgtgtgtgtgtgtgtgtgtataaacagatttttatgttgtatgtatatacagtcaagaagtggaaaagatacagtatttttttttttttgcgtgagagtttgctacctgttgagcagtgttccaggatttctaataatctttcatgattttggatgatactggtcatgtccggggaagtatggttgtagactcttgccatcagtttaagttaggtagtagttagcaacatggcatggaatatataaaagcattttaaagtggataataatgttcttaaaatgaacgaaggaaatgacaagattgttccctcacagaaaagaaatacaaattgcccacatacccacaaaaggccctggaacagtaggcattctccttgcctctgctgatagtgtagggtagcccagtcctacaggggagctccacagagtctgctcagaatgacagcagtgctttcaggagttaggcctgagagctcactccattggtaaatctgtgtacatgtgattgacttagggcaggattacctgataactctgaggaaagaaacaagagagaaaggaaacaagacagtgtttttattgttatccttttatgtctttgaattttggaaccttttgaatatggctcattaatattaagatgcttccttcttttcttgtttgcacctggctctgatggtcacctcccgtaccctctcttttttcttacttgccattactttttacacggtgtgcctttattcttaacacccagtcagtcggtcagccagccagccagccagtcagtcagccagtcagcttctcttttgttgcctggccaaccatgcagcccattgagtttgtagttggggttgatcttcatctctgtctgattaatctttttctctgatttagaagacaataatggatttctttcagacagttatttcaattgcccaagagtttcctggggccagtcttatactggcgactaaatatttaagccccagagcacgaaggcttttcttttactgtcacttagaccatcggtttaagtcctgtgtggtgtaggattgagttcatattactgtttgatatcatttttgtttgggttattataaacgtacgtgttctgtttcactaatttgtctcaggcaagagtttgtgctccagtagcgacgccgcagcccactcccccctgctcaccatcacctgtgagggagcacgtgcgagtgaaaacgccagactcttctccctgtgaatccgatccagatgcggcttcttctataaaagagatacgcgttgaaaaaggtggaaaccttgtttctttaaaaaatgtgtgtgagagtgtgtgtgtgcctctgtacttcatggcacgtgtgtggaggtcaggggaaacttggtcaagttgcttctctccattcactttaacagtgcttgacttgctgaggcatcttgcctgaacctaaaacttttatttctataattcagttttatgtttagtaactataagtagtttttacttagtagtctttagtaaatgccttttttttccccaaggaagctaaggaattgcttgtcacttgactgcttatgtgctgtagcagatagcacacactaggtattttataagttaaattaagagttcttttgtttgagttccagactgtgaggtcacactaaggggctgcctttggtgacagccgccttgctgtatcatgaatgacaaaaggtgtcatatagcagcgagagagccagaggctcaggctgaggcctcacctctcatggagctgctgatcccacgcaggactctgtgccccgggtggctcacaggggcctccctcccaccctccgcagtgcgacacagggttaaggatgaggttccagcataaccctgcagggaggcgttcacagaaaagtagtatttctgaaaatacggagtttagtaactgctgaaacggctttaaatgtatagtagtcttaaaatgccatcttttcaaggttttaatttttatgccttttttaaaaaaatttacttaattttatatacgtgagtgcactgtcacagtcttcagactcaccagaagagggcattggatcccattacagatggttgtgagccaccatgtggttgctaggaattgaactcagggcctctggcaaagcagtcggtgctcttaaccactgagccatctctccacccccctacattttataccttaataaatgtagaaatgttcttattaaagccatcattgtcatcgtcattatgattgtttaatgccagtattatctaaaacaaggagtcatcacattagaaagctattgactgagtctttgttttctctttctcacctttaggaagtgatatgcctgctgtcatgcttgttagtacaccaacacgcactcctgtcgctacccctcctccagcagcagctcttaccccaactttgtccgaaacttccattgacaagttgaagttatcaagccctgaacttcccaagccatgggacagtggagacctgccactggatgaagagaatcctaactctcttcaagagcttcctcacccaagagcggtgtaagtgagagcactccctgttactctgcagctctgccagagccactcttcacactgttcctgcgcagaagtggcatagaaagggccggggacggggcttgttgtgagtcccgctgacctgcgattttctctgtaactgaggtggtggttgtttagttggtatcctccctggcctcattagtgttgggattgcagacatctttctaccattcatggcttcaatctattctttagaaaaaataacttttgtacattttaaatattttaaaattacaaatattctcttgtgtttgccaaagctttaaagtaaataagaataaaccatcagattattaatgaaatatgtaattatttctccagtgtagatcatcagatgctgtgcgcagttaatgtttgtattactaaaccatattgattccttttgtggctagagcagctttccaggtggcctctgataaagcccaacttcagaacaaggagtcttcctaacgagttacaggagtcactgtgctaaaagagaccttattctggttttatgcatatgaatggatgtaggccttcagtgatttgtaattcaaaatgtgcctttctcttcttagtgtaatgtctgtggctaatgaagaacctgagagtgtggacttttctgctcagcctgcacctccggagccagctccctcagcaccacttcctgagggcaccaaggccccttccctccagcgagtaccaagttcaggttcatccaccctggagaacactctgagcactgtcactgaaacagaaacgctagacaggcatatatctgaaggggagatcttatttagctgtggtcaaaacttggctaccaagagtgagttgacatatagtaattgactttgttagttaaagcagtctccttagtgatagcttttcttttaaaaatgtttttgtttatctttccagatttaacatggtttaatagatagatgttctgtgcaggttggttaacttttctgggctttgattttgaagaatgaaatctccctcagaattcttttctttagaattaatttgataataatagctcaagatatattctgttagtatatttttgtctttgcatgtacaaatacctaaatacatcttagatgtgtacctttatataggatcacggtttgtatattcttgtaaaacttggacttgttacaaagtaatgtgtggtaaacgtatttcagttccagcacacatggatcatgcccttttccagtggttgttgatctactgggcattgcttaagtgaggggcgtttatttagactgttgcagactgcgtgccaggctgtaaccaccctccctgcacgactgcacttcctgatgacgtccataaaccatgtctacaggtggatgctgaggtagatggccaccttaggattagcaatattccatcagcgggcttcctggggagaataaacagcttttcacttcagtcagttaaatatgtttaacagcttgtaggggagcccgtttctgaagtttaacaacttgtagggatgcccatttcttggtttcatggctattttggtccttgaagttagtctgggactggagagccagctctaagctgctcacaccggtctgtaaatacactttgagggggtcagatgccctcttctgacctccatggcaccaagcatgcacttgggacacaggcatatacgtggggaaaacatctatacacacaaaataataacaacaattcaaattattaaaaccggtcagaaccaggcatgctgatgcacacctttgaccaggcatgctgatgcacacctttgatagctctgaaggcttcaagtccagcctgagataccttgtcttgacaaatcagacatatattaaaaactaaataattctgatggctaaataggtgaaataaaaagctcatgtttgttatgtttgttttgagtaatttatctaataatgacctaaatatgaactttaccagttttgctactgaactttaagtttaagtgcagcacctgtgttttctgagcagatttcttagtaaatgtctcctttttgtcttaactgctctactttgctttctgcttttaggacctggggacttgtttctgatgaacataaatgacagcttatccagcactctgcaggatgcccttgaaatggtaaggagaagctgactccaggcccactgcaagaatggcttgatgtctagttgccgttgagcagtttctgagttttcacttgtttgagggatacacacaaaggttagtgaattgttaccatgagaccaggcacagttgtaaatccctgtctgtggtcacagacacttcagaggctcagttgaggaggctgagagctactttgcaccaccttgcttagcaggaaaaggaaagatagcagggaaggagggagggaggtagacatactagtagtagagggttgtttactatttcattatatatttaattatataatcctatataatgggagaatgaacagaaaattgttactgacctctaaggttctgatagtcaaaaaatacatgttaatgtaattaggtaatgagatctggaattgtttcagcagtgccttgaacaggatcttaagtactctaagtctcctgtggtagtttgtgatatatagatagatatatagatttatgtatatatgcattaatatgtatgtgtatataaatttaatgggttaaaaatcaaaatggcacagcggtcaagaggaggaccactattgcagaggacccatgtttggtttccagcccccacatcaggtgggttacagccacctgtaactccagtttttggagatctgacgtcctcctatgcacttcatgggcaccttatgtgcacatactcacacacggacatgaattaaaagtaatgaaaataaattctttataaaacactaaaataagaataagatccagggaaagtagtcattcctggttactcgagccacagatgagaaaaaggcattgatgataccatgttagagattttatttacatggatacagctatcatacacacatagatgagaaaaaggcattgatgatatcatgttagagattttatttacatggatacagctgtcatacacacatattaattttcttttacaactgttaagggatgaaatttttcacattttgaaatgtttccaagtaacttaacaaaggtgattatgctctgctgcgcattccattcattgctaagcattgttcactttgctgtttctctcaaagcagtgtttcacaaaggagtaggaaaatgcttcaggaagtcttttttttaaaaagaaaaaaagaaaaacaagtctcctgagaagattttgtttgaacagttattttctaacaatgacttgttaagtaattatttgagtctcctgtattacagtcactgttgcaaaataatatgtgagaagacataattatagtaatcttactttcagagaattacatgtatgtttggcttacttaatacaccactatgggattgttatttattcttagaactttatctggtattaaagtaaattgatcaactgaacccagacaaaattataacctttctttttctacatttgagaatatttctaattgtaattttgttactgtatataagtttatagtaaatgcaaatgaaaaatataatctaggaaagcccagagttaactgaaaccatgtgctgttaggtacgttaaccctacacagctaggaggtgtagccagagttaataaactgtatttcattaaaacagaatatccaaaaataatttaaataatttgctatactttatcttatagccaaaaggcaagaaattgttgttttaatgaattttaaatcatattcattcttgtattaagaaggaaattcattttgtctgatgcggaggctcacagcatctcatgtttttcagacaggtgttttgaggcacagtgaagcctagggaaagtgttgcgtaaatgaggctttctgtgcctcccctagtttagactgccggatgtccgcccagaggaggaagagcactgaggggctgtggagactctcgtgtttctgaagctttttgttgtctgtggcccaggttgcagcatttcccctgtgcttgactgctggtttgccacacctcgtcctgatatgcactacataaacgggaagcaggatgtcatgtgagccctacactcaagccatcagaacgtcatgaaagcactagtttagttgtgtgagacagaagatctgtcatagatttgcacttaaattgctttgtagtgtttgtatatatttgaggcagctgtgaaatgtttttattatagtcaaatggcaatgagagctacatgacaatagtgagctcatcttctggtatcatttcttcctaaagtttcatcagtcagagttgagaaagtggagttgtatgatagccgtttttgatgttgtctttgtgtctgctctaggaagatgaccctcccagtgaagggcaggtgattaggaggccccacaaaaagcgtcatgaagatgccatcgttgcccttcttactaagcaacaacgggagttattagtttcacagcaagaggaggtacttttcaaccataaagatttttggggggagggctagatataaatacaggaaaaatattaaatatccaacttttaattttgataagacagtgtttaagatactctataatcagagtcatggtccttttaacctagattgaactgagctttgtaactgagaaaaatttcgacaatctcctccaaacttttatgttacaatttaaaaacacaacaaaaaaatatgaagctttaaagatacaattattttgtgtgtgtgtgtgtgtgtgtgtatgtatgtgtgtgtgtgtgtatgtgtgtgtatgtatgtgtgtgtgtgtatgtgtgtgtgtgtatgtgtgtnnnnnnnnnnnnnnnnnnnnnnnnnnnnnnnnnnnnnnnnnnnnnnnnnnnnnnnnnnnnnnnnnnnnnnnnnnnnnnnnnnnnnnnnnnnnnnnnnnnnnnnnnnnnnnnnnnnnnnnnnnnnnnnnnnnnnnnnnnnnnnnnnnnnnnnnnnnnnnnnnnnnnnnnnnnnnnnnnnnnnnnnnnnnnnnnnnnnnnnnnnnnnnnnnnnnnnnnnnnnnnnnnnnnnnnnnnnngaatcatcatatttacaagagagttcctgctttggatgatttactataatgggcctaatggtttttcttattactgaaggacttggataacagcgtgggtgagcttagtgaaggacagaggctcgtgctgaaagcagcagaggacatctcagcaggaccgtccggccaaatgctgccgcccacttctcctgcagagccctcctatcagcacgcagaccctcggctggtattgcagcagtctgacatggcctcaggtacacacaactagttcttcttggtgtttctaaaaaatactactttaatcctattgcagtctcttacattcttcccaggctgttgctgtagtgtactttacattacaatccagcgatgtgttctttgtatgaatagatgaaggcttgaagattttattatatcttttctatgatatacaacactttctcctgaatatgttttgtgtgtcttcattcgtatgggcacattgggagggatatgagacaatttttgtaatatacatacttaaaaatttataatatagatgtactattttaatgtatactagaaaaatataacctctcagaaccaatagccatgtttaagacagagttcaatgagatcataccactctagaaatgtgttctctatagagtgtgatttctcagatgtagtgtttagtgtgtttgggctatctttaagagtaactgcaatttctgttgtagcactttggcgattactagcatagagttaattctcattgtctgtggtagtgtagcctataagttaagcacgtatatattaggaaacactgaactcttaggagaaatacaggattgggttccaggaagcctcttggaacgttgtcacatgatcggtatttaacctggctttatgtgtgtttctgtttaaagacattgtatttagtttctgtgattgattcaccaacactgaaatcacagccaaaacactataattcattcccaaagaagtgtatataacacatagtcctccccaggcgtgtcagagtcttcttgtgctcaggaacactgggcagtaattttcttttgaaatgatttaggtatcattctaagttcccaaagcacaaatgtgcgtgtctgtacttaggtctgtctgtctttctgtctgtctgtctctgtgtcttgcacatacgtaagtggggaggaaggaaagtataaaggagagtgaatgaacacaaaaatgtggaaaacttggcattaacttcactgttcaaaggtcatctcttatagctaatgtaaaaaggcagagtggggaattttatggtgggtgatggtttttcactgcattgctaagagccacaaaaagaccataaagtttctgtgaacagtgagttttcattagaattatgtttctgtgagtaggtaactttgcaaatggaaattggccagttaggtgggttctgactttcccagactcattaatgcattctgtattaggttggtgcaaaatcaattgtggttttagacaataaaatttaaatcactgtaactaaactctaacacatctttatcagatagaaactattataatcaacatgcttttttctacaagaaattgacttgcttatttctataacataaaactctatgctttgcagcttgacaaattcctgaaaagtattttctgcattctgctggttgtggaaatactcatcctgctaaaagttctgcaaaagcttaaagaggcagcagttggttggtgagataagtgaagctggtgtatcaggcaacagcttggtactaatttctttggccctgtccgttcaccttttgaagcactggctgcgcagggcgctgagtaaccccgagctttcccgcctgtgcctaaatcccaagtgtccacttagaggctgcttactaacaatgcgatggcctttgctacacttgttccctgactgcctcataacttatttcacctatgcaaactcttctgtttgccacaaggctggttacctcccctcagtttctttctttattctttttgtttttttcgagtcccctcagtttcatacgcctaacttcctcagaatctgggtggcaaatctcctgcctctatctaccagagttttaatctgtctactgaaactttcaccttctacatcctgctttttgttaataggccatcaggtttttattgacacaaagtactcaagggtcgtccctatagtaagtagttggctgtggttgtggagaagacgctgacagagagttgggcctcgctggccagggctgtctaagcatcccagtgtgctgagtgtctcaagcatcccagtgtgcgagtgtctcaagcatcccagtgtgctgagcgtctcaagcatcccagtgtgcgagtgtctcaagcatcccagtgtgctgagtgctcctcagatgccatggtttcctggggttcaggaagattccgtggctggatggattggccacgggcaggagccaggatttttctttccatgcaagtttagctttgggaagtgttttggagctttttagtccaacctctgagttggtcactgatggttgtcagatacgaaccactttttgctccatgttgcagtccaatcaaataatgtttggttatcgctgcatagaataacagggtggaagttcaaaggtatgacttataaattattttttagtcatctcatgaggtcctcacccaacttttctacttttccaacttaattcaagtgtctagcggccatcagtgatccacactgaattcttggcaacattagtgtagtcataagagcatcgcttcagtaatgaacgattgtcaccaggtttgatgactgggccactgcacacctcgttgtcaaggccttcatctcttttgcagagcgtctccacacacctctgccttgtgtgttcattagcactttcagggccagatgagttggtaatgttgttagttgtctgtactttttcattgtctatttgaactggaataagaaaattgcttcaacttgtttcttgttcatagtcattactataatataaatataaagtaggcaacaagtagtgtcactagcaaaaaaccaaaaccaaacaaagccaaaagacccacgactccgaagtaggagcgttaaaatgatataaaatattaccgtatttatttaagaatttattccaaaatcaaaagataaatttcaacaatacaaaaaagtttactcttgccgggcatggtggcacatacctttaatcccagcacttgggaggcagaggcaagctaatttctgagttcgaggccagcctggtctatagagtgagttccaggacagccagggctatacagagaaaccctgtctcaaaaaaacagaaaaaaaaaagtttattcttacaccagcttgaataaatgacactttaggacatttgaaattagacattagagcattgtggaatatttagtgttggcttcatgctcagcgagagcgttagattgttcagaattgaaagaaattcaggactgaagttttcagtataatacacataaaattgctgtttttctcattttgtgcatatggtaagagtattacacttgctacatactttcagattagtttttatacaacataaaatgcaacacagctgactgggaaagtgcaagaacccaacagacactagagggctctcatagagcacctgagagacactaggagttaagtcttggctcttaccgcctgtccagcatttcttatgtctcaggtggtacccagatcgcttgtgatgtagtaattatttttgtgtggaatcattgtgctctaatgtctaatttcaaatgtcctaaagtgtcatttattcaagctggtgtaagagtaaactttttttttttttttctgtttttttgagacagggtttctctgtatagccctggctgtcctggaactcactctataggccaggctggcctcgaactcagaaattgataactattattgataatcattgataactattatttctttttgaaactggtaattatcttaaaaaggtaaccatatttgagaataagatggattgtgtgtaacttaatactttttgctctgattaaaatattttattatctatttgtgagtgcatgtgtgcatgtctgtgtgtgcatgcacacttagataatgacttccagagcttgagtctcctgtgtgggtcttagaaattgaacttaagtcgtcaggattgccagccactaaactgtctcagtgacctttcagtatgatttatcagactgttctgaatatacagtattcttgagtatacagaattgaaaagtaatatgatatagactttatacttgccatcacccagtataatgtacaaattattctagaaaacatttttaataaatcataacatcaaaagattccttaattggaagtttataaagacaggttttagataatgactagtctgcaaaataagtgtttttatttatttaatactttttactagtttgcaaagaatcaggttttattatatctttttttgactaaattttaatatttgagatttaatctttaaatatacatttacatatatatgcatgtatgtatacacacacacaacacacatgtgaatgtgtgtgtacatggaggctagaagagttagggcctctggagctggagttacaggcagttgtgagcttcctgatgtggtgctgacactaaccctgcatcctgcgcttgagcttgaccactgagtagcccctctagcctctgagttctcaacagcaggctcactgtattgtcttaaccataacaatgaagtaatatggcacaatattggttgtgtatgtgcatgtgtgtatacatacacacttagatgtgtatgtgactatatttggaagaggcaatagctgagtggttgagagtttgggttttttaaactcctgaaatgtattttaattctaactctgtgtgtctttctttgttcaagtaacttatgtctaaacttcctatttttcattttttaaattaatttttaagtttagtatgcaagtagtagtgggtttcatttcagtatttgcctgtgcgtccacgtgtgtgtgtgtgtgtgtgattatatggtattcttattcattcttttccacctgcccaccttttgctatccttccttctcagctctcaccagtgtccttccttcttgccagtctcctttttcttttgagtcctatgcatcccataaccctttcacttgtccctactcctgtaagatggtctcctcctttctcatggtccccttctacattaacaacttatacagaggtagactgggatatttgtctttctgagtctgtctagcttactttgcttaacgcgatgatttcaagttccatccattttcttacaaatgtcattatttcttttttctttacagttgaatacaattctgtgatgttaatgtatattttctgtattcatcttttgatagacgttttggtctgtttccatttctttagcttgtaaatagtccatcagtaaccatgtgcatcctgtggtatgttgacttacaagtcctctgtgctctaagtgggtcctgtggtgattttgtctttagcttttgaggaacctccacactgacttccatgaaggcaataccagtttatatcccaccaacagtgaatacgcatttttctttcttcacattttttagcatttgcctttatttctgataataactatgctgattggggtaaaatggaatctcaagcagttttcatttgcatttccctaatggctgggaatattaaatacttttttgaatatttattgacatttgtagttctgtttagaaattgttgtctctgtgtgtgtgtgtgtgtgtgtgtgtgtgtgtgtgtaagcctgtgcatgggtgtggaaacctgaggtcagtactgacagcttcctttacaatgcttccccttgctttctgaattagtttctcttactaaacgtggagactgccaattgatttgactgcctgtccagtaagcctttgggatctacttgcctctgtcttcccagcactgagggtacaggcacagcaatgcgcctggattttacatggcggctaacgatctgaacacagagcctcctgtctgcacagtgagcatggtccctgtgtccccagcccgtgttctctctaagaagtttattcagttcattactccattattgttgggataattcacttttaaaaatactttgtttcttcttgttttacgtgcattggtgttttacctgtatgtatgtctgtgacggtgtcagatagcctggaattggagttacagacggtggcgagctgggacctgggagttgaacttaggttctctgtaagagcagcaagtgctcctaactgctgagccatctcttcagccccagttaggtttttttttttttttttttaagtgttttgtttgtgcagttctttatattttggatagtaatctcttgtctgacatgtagctcacaaagatacacatttttctccttctgtaagctgcctcctccctctgttggtagtttctccattgggtaggaactgcttgatttcttgtactctcatttgcttattcttagaataatttcctatgttaccataggagttcttttcacaaagcccatgcctgtgactgtatcttaaggacctctagcagtttgagagttttaggccttataactgtggaggtgtttcatccacttgatttctgtgcagggcaagaactatcgatacccataccttttcacatgtagatacccagtttttctaacactctgttaaagaggctgtcctctttcttttttttttttttttttagagatttatttatttattatatgtaagtacactgtagctgtcttgagacactttagaaggagggcgtcagatctcattacagatggttgtgagccaccatgtggttgctgggatgtgaactcaggacctttggaagagcgtttgctgctcttaaccgctgagccatctcaccagccctccttttcctaatgattgtgtttcgttaaagattagtgggtgtagttgtgcaggttgatttctgggtcccccgttcgagtcattgctctgtgtcttagttactcgtcttgttgctgtgataaatatcttaccaaagcaacctagtgaagaatgggttcatcactgcagggaaggcgtggcgggaggagtgggaggagctggatgatggccgccgatgctccacttgctttcttcttttaattcagcctaggaccctgcccatggaatgcctaaggtggtcttcccgcctccgttaacctaatgtagataattcctcacagcatgcccagaggctcgttttctaggaaattcaagatcctgtcaggctgatgatgttaaccattacaactctaaatcttactaatttggcatccagtccaattacttttaagccataactttccacccttttcccccatagactcatgaccattttataataaaaaattcatttaatccaaaaaaatctccatcatttttaatcattacaacattgtttaaaagtccagaagggaataattgggacaattagaggaaatcagaccaaagcgagactaaaactcagcagagaatgtatcaaatcctgcaactctgtgttcagctctgggacctgtgatgcaatctctgggccccaaaggacttaagtagccccttcttcatccctccatctctgtcactaccgcatacatatccttatcttgtgtcaactctactccgtgtctggagttgtccttggcagctgttccttggttctggtatttctaacatcctgggttctccattgtaaattaggtctttcttttgtagtttcctgcaatggcctctcaggacctccggtcctgctctgcattgctttgcctcggggctttctgacatggtagtcagccctccatgatccccttagtctgcttctcatgccggcaaagccagtgatggtgatgccaagttctgttgccagcttgagatggagcctgacccctcagaccacagccacatcagcttctgcttctgtctgctgagcctggagaaacccttccggttcagagaacagggagctgcttcggtagcagtgtgtttcaggtcaggggctccccttgcaaatgaattgacattttttatgaaatggagccttcactggctggagccttgccctcaggacacctttgctgttgtgtagaacacagcagcagacttccttaatggtgcgagtcacttgagcagttgcagctgccttcaaacctgccttgcctgtaaggttaacttgctcctgctattttccttgtaaaagtacacattttctttctgcttagctgcttttcttcctcacatagtcctagagtggagcagttggacagttgctgcgccacagccaagtgtgctcctgtcttggaatttcctgtgccaaacaaattagtcctttacatttaaattgaaccccactcaagtcttcaggacataaatgaagtcaaattctttgccaggacatcacaggagtgccattaacccagtttctaacagagtcctcattccttcctggagcctcataaacctccactgtttgtgtttctcttgttagcttttcttccaggctcctacccagaaaggcccggtaagctctgcttacagcgttctagcctctgcttacagcgttctagcctttgcctacagcgttctagcctttgctagccaccactgacagcctgtcctcagtcttcccataaatcatggtcatgtttatcacagcagcagtccacttctcagtgccagtccctgtccttctgtgtctgctgctgggacacagcattcatttggggctatagttcaagggcacaggcattacagaagggaggacaggacagcaggtgcgtaaggctactgccgagagggatggttgatgaggctcagcccgctttgtcctttgtattccctccagaaccgtggccatctccaggcatgcggtccttccgcagtcaatctgacgtggataatccgcacaaacatgcccaaacgcttgtctgctaagtgaatctaggtcctatccaattgatagcattaaccatcgcagtctgtatcgctcccttattaaactttgttttaatgggtcttaaaattctgtggtgaggtttgtggggttttttttttggtcatgtttcttctatcaaaatttactgattttaaaaactaataattcgtacattaaaaaggtccataaaataaaacattgtccctttttgattaggagattttattgcaccttgtcattattaaccttgtattaaatttaaatggccaattaaaacaaatagttctgagaccatgcatacaggtgtaacactaacattcatttagtttttttgagctctttgggcagatgtgatgaccttaccaccttcttgtctgtggccttgatgaacagtctgagtcatatgaatagcaaaatgatccaaaaggaactctgaaagcacaaaggcttacctggaactatattaatggtggcagcttcaccaagtaggataatgtagggctatcttccagcttcccagcagaaaggtgatgggtctttcctttcagcttagcaagtttgcgtgctgtgtgaactatgtgatagtctagttcaggcgcaataccagcttttctctggcctgaatgattcaggagtcacctgagcagtgaagccagcacttcgattgcaggtcatttttgctattgccgcaaggagcatctcagacagacgtacttggcattgactcccccagagtcaccagaaagaacctcaggtgcatttcagtcgactttatacttcaattgtgacattgactagagcacagttacctaccaagcaggtttgataacagcagtctccacttggcccacagcaacagtaccggtaccgatagttttatagacacctgggaggcaggtgcgtacattggctgctcagttaggcaaattaatggtaggatacattccaaagctaccagcagtagggttgcattggtactgttatcttcatgactgactgtattcttgacccaaggcaagctagccattgacaccagcatgctgcctgcatcctaaggagaaatcaacacaaatgctaccgtgccaggttcataaccaattctttttataaattgtcttcttttatatgtatagatgttttgactacatgtacatcagtgcaccacacatgtccctgttgcacacagaggccagaagagggcatcagattgcccggaactggagtgatggatggttgtaagctgccctgtgggagttagacactcactgaccctgaattctatgcatgagcggtagctgtaaaaggagttataaattctagctgtcccatatagaagacacacaatccaggtatcttatttacaagttgtaagcctagattgggcaggtttggagctattctaatttacatcccaacatttagcatttgaatacataacagcaccagaccaactgccatagccaattttcctaagaaattttctttctttcttttctttttttttttaaagatttattatatgtaagtacactgtagctgtcttcaggcaccccagtagagggggtcagatctcattatggatggctgtgagccatcttgtggttgctgggatttgaactcaggaccttcagaagagcagccagtgctcttaactgttgagccatctctccagcccatgaattttcttaatgtaaacacttcattaataatttcttgggggctggagagagatctgatgctttttctgggttgtctgaagacagctacagtatacttacatatatataataaataaatcaatctaaaaaaaccaatctcttcacatctcttctgactgaaggctgctcagtggaatccatttttgttgatagcaataattgctttatttccaatgtttaagccagaggcttggttatgatttagccagttttagagagccagcttcaaactcagcaatacccatagcaatcatttggctagcatggtcagccccagatatgcctttaaagtctgtgtgtcctggtgcacggaaaatatccttgctatttccagggaggagtaattgctgactctatgctcagctttcagtttatccaggccctgggccatctcttttcaatgttttagtgtccttctgtctctcaccacttttgtacatcagtggtgaccttgttcagtacatgtcaggtaatagttaatagtttgtgttgctaatgtaagacagagcagagattagtgagatagagtcaaacagaaagttgttttttctttttttaataaagaagattgttaatgcccttgccaaactaaccgagagagagagagagagagagagagagagagagagagaggagatagcattaataaatattagaggcagcaaattctagcagagcctgcgaatcattagggaataactttaaaagcacatcccccctgccgggattgacagcgcacacttttgatgccaacgtttggaggcagaggcaggtggatatccatgactttgaggccagcctggtctatatagagagttctaggacaaccagagctacatagtgagactctgtcttggggaaacaaaacaaaactaccaaaactaaaaacactaaaagaaatggatgagcttgtaggtaactatgatgtcaaagttcaatcaagaagatataaacaactcttcctgtcataatgtgttctttcctttgctcctgtgatggagatggcaatcttccttttctgtgtgtagcagcattccttcaagaatcctggagtactggcttggtggccatgaactgcctttgtttgtgcttgtcttgaaatactcttcatttccccaccagatagactttaaaaatagactcacctgcttgtttgtgtcctttttctaaataacatggatttacaagtggaaaattccacatctggcctcatgtaggatttttgaccttcagtaagattttacagttgttctcatagattctatgtctaataattttgctgttatattataggtttgatcttgatagtaagagaatttttctattatattatttattgttataatgaagagaaaaggtaatagctttgcatgtttatgttagtgtccagtcatggcactactactaagactcttactaattcccatagttattttaggatcaccaatactattggttctattcctttattagagacccaaatcctttagaggttttggggtttaccatatcatcagcaaagaagttttttttttctctcaacagcagataagctaattctcaatttatttgctagacagttaaagaaaaaatgttagagaagtgacataggaccagagaaggtcatacatacagaatgaaaacagcaagtgtgacagcagagcattagttactctacagtttgcatgttattgtctttgttttaattggtcttatagtgtactagagaattaaggaggaagtcattctgataaattgctttgtacatattaactactatagagataaatattaaagctcaatgggtaaattttgctttgtgcaaagtccattaaaaacttgatttagagagaaccggacagcttctgggacgggcagaagcacagagccgctgaggcagcagcctgggcgggccgcagacaaccggccaccatccggaccagaggacaggtgtccgcctggcttgggaggcgacctcagcctcagcagcagcggtcgccatctgggttccgggactccgcgggacctaggaaattagtctgaacaggttagagggtgcgccagagaaccggacagcttctgggacgggcggaagcacagagccgctgaggcagcagcctgggcgggccgcagataaccggccaccatccggaccagaggacaggtgtccgcctggcttgggaggcgacctcagcctcagcagcagcggtcgccatctgggttccgggactccgcgggacctaggaaattagtctgaacaggttagagggtgcgccagagaaccggacagcttctgggacgggcagaagcacagagccgctgaggcagcagcctgggcgggccgcagataaccggccaccatccggaccagaggacaggtgtccgcctggctcgggagacggccttggcctcaggagcagcggtcaccatcttggttccaggactccctggaacttaggattttagtctgcacaggtgagagtctgcaccacagaagctgacagcttctgggaactgccaaagcaacacagcttctgagagaggccctgttttgggcctttttcttcgaccaggaggaggtccaaaaacaagatatctgcgcaccttccctgtaagagagcttgccagcagagagtgctttgagcactgaaactcagaggagagaatctgtctcccaggtctgctgagagacggtaacagaatcaccagaagaacaatctttaaacagagtcaactataactactaactccagagattaccagatggcgaaaggtaaacgtaggaatcctactaacaggaaccaagaccactcaccatcatcagaacccagtactcccacttcgcccagtccagggcaccccaacacacccgaaaacctagacctagatttaaaagcatatctcatgatgatggtagaggacatcaagaaggactttaataaatcacttaaagaaatacaggagaacactgccaaagagttacaagtccttaaagaaaaacaggaaaacacaatcaaacaggtagaagtccttacagaaaaagaggaaaaaacatacaaacaggtgatggaaatgaacaaaaccatactagacctaaaaagggaagtagaaacaataaagaaaactcaaagtgaggcaacactggagatagaaaccctaggaaagaaatctggaaccatagatttgagcatcagcaacagaatacaagagatggaagagagaatctcaggtgcagaagattccatagagaacatcggcacaacaatcaaagaaaatggaaaatgcaaaaagatcctaactcaaaatatccaggaaatccaggacacaatgagaagaccaaacctacggataataggagtggatgagaatgaagattttcaactcaaaggaccagcaaacatcttcaacaaaattattgaagaaaacttcccaaatataaagaaagagatannnnnnnnnnnnnnnnnnnnnnnnnnnnnnnnnnnnnnnnnnnnnnnnnnnnnnnnnnnnnnnnnnnnnnnnnnnnnnnnnnnnnnnnnnnnnnnnnnnnnnnnnnnnnnnnnnnnnnnnnnnnnnnnnnnnnnnnnnnnnnnnnnnnnnnnnnnnnnnnnnnnnnnnnnnnnnnnnnnnnnnnnnnnnnnnnnnnnnnnnnnnnnnnnnnnnnnnnnnnnnnnnnnnnnnnnnnnnnnnnnnnnnnnnnnnnnnnnnnnnnnnnnnnnnnnnnnnnnnnnnnnnnnnnnnnnnnnnnnnnnnnnnnnnnnnnnnnnnnnnnnnnnnnnnnnnnnnnnnnnnnnnnnnnnnnnnnnnnnnnnnnnnnnnnnnnnnnnnnnnnnnnnnnnnnnnnnnnnnnnnnnnnnnnnnnnnnnnnnnnnnnnnnnnnnnnnnnnnnnnnnnnnnnnnnnnnnnnnnnnnnnnnnnnnnnnnnnnnnnnnnnnnnnnnnnnnnnnnnnnnnnnnnnnnnnnnnnnnnnnnnnnnnnnnnnnnnnnnnnnnnnnnnnnnnnnnnnnnnnnnnnnnnnnnnnnnnnnnnnnnnnnnnnnnnnnnnnnnnnnnnnnnnnnnnnnnnnnnnnnnnnnnnnnnnnnnnnnnnnnnnnnnnnnnnnnnnnnnnnnnnnnnnnnnnnnnnnnnnnnnnnnnnnnnnnnnnnnnnnnnnnnnnnnnnnnnnnnnnnnnnnnnnnnnnnnnnnnnnnnnnnnnnnnnnnnnnnnnnnnnnnnnnnnnnnnnnnnnnnnnnnnnnnnnnnnnnnnnnnnnnnnnnnnnnnnnnnnnnnnnnnnnnnnnnnnnnnnnnnnnnnnnnnnnnnnnnnnnnnnnnnnnnnnnnnnnnnnnnnnnnnnnnnnnnnnnnnnnnnnnnnnnnnnnnnnnnnnnnnnnnnnnnnnnnnnnnnnnnnnnnnnnnnnnnnnnnnnnnnnnnnnnnnnnnnnnnnnnnnnnnnnnnnnnnnnnnnnnnnnnnnnnnnnnnnnnnnnnnnnnnnnnnnnnnnnnnnnnnnnnnnnnnnnnnnnnnnnnnnnnnnnnnnnnnnnnnnnnnnnnnnnnnnnnnnnnnnnnnnnnnnnnnnnnnnnnnnnnnnnnnnnnnnnnnnnnnnnnnnnnnnnnnnnnnnnnnnnnnnnnnnnnnnnnnnnnnnnnnnnnnnnnnnnnnnnnnnnnnnnnnnnnnnnnnnnnnnnnnnnnnnnnnnnnnnnnnnnnnnnnnnnnnnnnnnnnnnnnnnnnnnnnnnnnnnnnnnnnnnnnnnnnnnacaaaatcctaattaacaaaatcagaactgaaaagggagacataacaacagatcctgaagaaatccaaaacaccatcagatccttctacaaaaggctatactcaacaaaactggaaaacctggacgaaatggacaaatttctggacagataccaggtaccaaagttgaatcaggatcaagttgaccttctaaacagtcccatatcccctaaagaaatagaagcagttataaatagtctcccagccaaaaaaagcccaggaccagacgggtttagtgcagagttctatcagaccttcaaagaagatctaattccagttctgcacaaactttttcacaagatagaagtagaaagtactctacccaactcattttatgaagccactattactctgatacctaaaccacagaaagatccaacaaagatagagaacttcagaccaatttctcttatgaatatcgatgcaaaaatcctcaataaaattctcgctaaccgaatccaagaacacattaaagcaatcatccatcctgaccaagtaggttttattccaggaatgcagggatggtttaatatacgaaaatccatcaatgtaatccactatataaacaaactcaaagacaaaaaccacatgatcatctcgttggatgcagaaaaagcatttgacaagatccaacacccattcatgataaaagttctggaaagatcaggaattcaaggcccatacctaaacatgataaaagcaatctacagcaaaccagtagccaacatcaaagtaaatggagagaagctggaagcaatcccactaaaatcagggactagacaaggctgcccactttctccctaccttttcaacatagtacttgaagtattagccagagcaattcgacaacaaaaggagatcaaggggatacaaattggaaaggaggaagtcaaaatatcactttttgcagatgatatgatagtatatataagtgaccctaaaaattccaccagagaactcctaaacctgataaacagcttcggtgaagtagctggatataaaattaactcaaacaagtcaatggcctttctctacacaaagaataaacaggctgagaaagaaattagggaaacaacacccttctcaatagtcacaaataatataaaatatctcggcgtgactctaactaaggaagtgaaagatctgtatgataaaaacttcaagtctctgaagaaagaaattaaagaagatctcagaagatggaaagatctcccatgctcatggactggcaggatcaatattgtaaaaatggctatcttgccaaaagcaatctacagattcaatgcaatccccatcaaaattccaactcaattcttcaacgaattagaaggagcaatttgcaaattcatctggaataacaaaaaacctaggatagcaaaaactcttctcaaggataaaagaacctctggtggaatcaccatgccggacctaaagctttactacagagcaattgtggtaaaaactgcatggtactggtatagagacagacaagtagaccaatggaatagaattgaagacccagaaatgaacccacacacctatggtcacttgatcttcgacaagggagctaaaaccatccagtggaagaaagacagcattttcaacaaatggtgctggcacaactggttgttatcatgtagaagaatgcgaatcgatccatacttatctccttgtactaaggtcaaatctaaatggatcaaagaacttcacataaaaccagagacactgaaacttatagaggagaaagtggggaaaagccttgaagatatgggcacaggggaaaaattcctgaacagaacagcaatggcttgtgctgtaagatcgagaattgacaaatgggacctaatgaaactccaaagtttctgcaaggcaaaagacaccgtcaataagacaaagagaccaccaacagattgggaaaggatctttacctatcctaaatcagataggggactaatatccaacatatataaagaactcaagaaggtggacttcagaaaatcaaacaaccccattaaaaaatggggctcagaactgaacaaagaattctcacctgaggaataccgaatggcagagaagcacctgaaaaaatgttcaacatccttaatcatcagggaaatgcaaatcaaaacaaccctaagattccacctcacaccagtcagaatgtctaagatcaaaaattcaggtgacagcagatgctggcgaggatgtggagaaagaggaacactcctccattgttggtgggattgcaggcttgtacaaccactctggaaatccgtctggcggttcctcagaaaattggacatagtactaccggaggatccagcaatacctctcctgggcatatatccagaagatgccccaactggtaagaaggacacatgctccactatgttcatagcagccttatttataatagccagaagctggaaagaacccagatgcccctcaacagaggaatggatacagaaaatgtggtacatctacacaatggagtactactcagctattaaaaagaatgaatttatgaaattcctagccaaatggatggacctggagggcatcatcctgagtgaggtaacacattcacaaaggaactcacacaatatgtactcactgataagtggatattagcccaaaacctaggatacccaagatataagttacaatttcctaaagacatgaaactcaagaaaaatgaagactgaagtgtggacactatgcccctccttagaagtgggaacaaatcacccttggaaggagttacagagacaaagtttggagctgagattaaagggtggaccatgtagagactgccttatccagggatccaccccataatcagcatccaaacgctgacaccattgcatacactagcaagattttatcgaaaggacccagatgtagctgtctcttgtgagactatgccggggcctagcaaacacagaagtggatgcccacagtcagctaatggatggatcacagggctcccaatggatgagctagagaaagtacccaaggagctaaagggatctgcaaccctataggtggatcaacattatgaactaaccagtaccccggagctcttgactctagctgcatatgtatcaaaagatggcctagtcggccatcactggaaagagaggcccattggacacacaaactttatatgccccagaacaggggaacgccagggccaaaaagggggagtgggcaggtaggggagtgggggtgggtgggtatgggggacttttggtatagcattggaaatgtaaatgagctaaatacctaataaaaaatggaaaaaaaaaaaaacttgatttaatataaaatgtccagcagagagtggttatttgttatatctaggaaatggtcagctctgcaatcctagtgaaggtgattgcctttaaaggcaaaatgtctgtggtgccattaagatgtttcattttaaacaagttaggtcatgagtaactctttttaagtctttcattattgattaaataaaattatgctatatttaaaagataaccaataaaaagaaaaagtaaggttttcttagaaatatttgtggaaggagctggctggctcagtcagtaaagcaatttctgtgcaagcatgagaacccgagattgaaccacatcaaatggtgagcatgaggctggagacacggctcaagtttaaaacacgtgctgctcttgcagaagacctgggtttcgtttccagcacccacatgaaggctcacacgcatctgtaactcctgctccatagcatgtaccatcctcttacctcactgggcactagatatgcacatgggggcatatatacacatgtgggcaacacataaggctaaaaaataagtcttaacttgcaggggagagggggagtaatgccagccatcatggtgcacacttacaatctcaatgttggggcaccagaagaatctctttggactcgctagccagccagagtagcataatttgtaagctttaggctaaagagaatcttaaaggagattgacagcattcccaaaaatggagacctgaagtggtcccctggcctctacaaagttgtcttagagtttcattgctgtgaaatgtagagatcatctttatgtactgtgtggaaacatcgcctcaataaaaagcttatggccaatgagctgaggtaggactagaaggtgggacatccaacatagagagagaggattctgggaaatagtcaggccagggagatttgtccagactctgatagagagagactcgagaagctgaggaaaggtaactaatctaaccatgtggcatgacttagactagtttaaacaaggtgattgagtcatgaattagcagaaacaagccagagctgttggtctaggtgtttattcatatataaaaagtctcagagtcattatcttggggaacaaagaagctgggtagaaaagccacagtaacagtgaagagacaccatgatcaaggcacctcttataaaggcaaacatttaattgaggctggctcacagtttcagaggtccagtccattatcctcatgatgggaggcatggtggcaggcagcggacacagtgctggagatggagctcagagttctacgtcttgatcctcagaccgcagactatgccacacagggtggagattgggcatataaaaccttagagcctctccccacagggacacacttcctccaaccaggccatactcctaatagtaccattccctgtgggctaagcattcaaacacaggagtctatgggggctattcctattcaaaccaccacaacagtcaagcacccgtgtgtatgtgcacccatgtatacatgtgcagctgtgtaaacatgaacacacgcacacatatgcatgcattaaaattcattttaggaaaaatatgaaatataaatataaagccaaatgttaaaagctgtcgattttacgtatctgttgattcacagctttcagacagttcactgagtgagttataaatgtgaaagctcttggagtataaagggcagcacacatgtacagtgataccagatacatagatacttctgctcttacctttgtactgtttggatcgaggtgatgtttagattagggaaaataatgatcagtgtgatcatctgaagataaatcctacagaacagagctaattgatgccggcatgttctagccaggaattgttccttacataggattactttttttccatggacatatattcattgtacatagtactacatttcaaaggaacggacatttttataacactatgtcatgtactttggccatgtcctcccatatccctgtggtagtcttgtcaatctgacacagtctgttatctgaggagggagtctcaacgagagattctctctcttcacttggcctataggtatgactgtgaagagtatctagactagtggaaggcccacccactgtgggcgacaccagtccctgggcagagtatcctggatttgtatgagcggagacagcaagctgagtgtagcttcacgcgttagttacctcattcatctgtgctctttcttgactgtgtgtgatctgacttcaccttcgcctgggtggggacctggcgctgtgagccaggcagagcctttctccctcaagttccttttccaggggatcttatcacagcaacagggaatgaaaataagacaccctctgtcctcccctttgtcatctcttctcctcctattagtctctatctgtagcaaggttacattcttaaatagaaagtattatattgaatctgacttttagtgatttactgtttctgagtagctgcttaggaatgctgggaagtgtagtctgttgcttactgttttactaaggtaactctgacaagttaactttttctttacctgtttgatataggtaatatttgtgaagatttatgtgccagtcatggtccaatgagcttaagggagctggagttgcagcctgattctaaccttattcttcccataacacacactacaacagcagtcagcgatggtaatttaccagaagcagctgaagatttttctcaggtaccaaaacaagaaatttgtactttacttaagataagaattgtaaactctgtgagttcaaggacagccagggctacatagggagacccatgtctcaaaacgaacaagaacaaaaacagacttgatttcaatccctaaaacattttaggggccgggagaagcagagacagtcttactatgcagtctatgatgcctcaacacacacagcatcttctagaatgttctcaaaggaggaaggagaaccagctccacgagttgtcctttgacctactcatgaacacttgtcagcacaattccctgcccacacaaaataaatgaaattttaaagaataaaaagtatataaaatgtctgacacctagttaagtcactgttatcgtttatgactctgctataaaaaagccagctcagtgatttgtgcctattaagtatttcatatttatagctttaaaatttatacaatatgttccacaaaagcataacaattttataatgagtgaaaccaatagcccatgaaaccttgtatattaaaaaattagaatgcttgttctcaaagattttaatctaaataaatgttcatggtaataaatacagttttatattcatggttagtaatttattcctcattgtaaattaatttattcaatcagtattctttgcatggtattttacaacattccatgatatcaaggaagaatattaaaaatatatgataaaagttgcttatggaatacaatattatgtagggtttgttattgctaatctgtgttcaaacaaagatcaggaaaaactaataaatatgcaaatagtgtctgcattaaagaaaagattttgtgactaaaaggcaagaacttcatggatgcaatgacaaaagccccgtagatgacaatgagaattaaataattagttcttaccaaaaataagaacttctactctccaaacacagtactaagaggatgaaaagtagcagagtaggagacaagttagctcagagcatagagaggaccagcgttaaatgtgcgtacagcgcaactcaaagtgcacacaccctcatccagaagatgcatgaaaggtcagtcagcgtgagctgctgtgagacactaggaaatgcagagtaaagccagcgacctctgtaccctgattagaaagcagaaggctctgaggctgccctggatctgctggcaaggatgtgcaacagctgagctccagtacgttgcccctgggaattccgagtggtatcaacgtgcagctgacatgtgacgaacacattttacttcctaagaaaatatagaacagatgagtgctcataggaactctgtatttgtcttagccccaacttggaagcaacacaatgttcagcaaatggtgattggagaaagtatattatgttatatactctagaataccactgttcccagggcactgtgagtacaggaactcttgagatagacaataattcttatttatttatttacttacttactttttattgattctttgtgagtttcacaccatgcatcccagtcccacttctctccccatcccccaccgcccttggctcttgcaacctcctacccccaaaataataaaaaacatatacaaacaaacaaaaacaaagcatagaaaacatctcatcatggtagctgtagtatgtcaaagcatatctcacagtctatccctctgtccacacagcttcacttgtaaatgttcattgcagtgagtcattggtctgacaccatcagtactggatcctcgccagtctcctcccagttatcctgttgttgccctggatcgtggagattctgcagccccgaatcagcaggactgacccttttactggtctcagtagttcccagatgatagagattttggaggtgggccaactcagagccctggatctgagcctgtatagtagctgagctgcccagcctgctggctcttcctcatccatgctcccaaggcaggcaaactctactgctccagctgagccatccagtggtgccatcagcaggaggcagggccagctcttgtgctctcataccctgcagtcagctcagctgcacctatgcctccagagccagctcggctgcctagttaatgcacaggtcccactgtcccaagcctgtgaggggctgggcctgctctcccacgtgctatagctagtgagaggccagggatagctctctcccttaggccagctctcctgaccactgcaggagattggggggggggtgagagggcatcacccctgtacccatgccacctcatggcaaacgagtagtgggcctgctctcctatgccttttgggaaggctcaccctgtgccccctccaccagggccagctctgctgtgctgcccaggtgaggtgcagggcctgctttcccaagtgctgcagcaggcaagtaacaagggccagctctttgcctttcaggaccccacggcctgttttcccaactgccaccaattgggaggctcccccccccaaaattatgttgagtaaaagctagtaccttctccttgtaaaaaatatacaatgattccacttaataaaattctaaccaaatacagtcatgatcacttgtaatccatacttatgaggctgcgtcagaggatcacatgttgaaacttgtaaaataaaaaagagagagagagagagacgctagaaaatgcagtctagtctgtaacaaagcatttcagttgttggctttgcatagtgggaaagatggtgcagatgcctttgttggcctgtcacctgcatctgtcactctggagtcacacgtgtcataaatcccagcatctctgcattacctaagaggtgtggtgctcacaagagggatgggtgtcttcacactctcacactgtgaactgtgccttaagtccaatcatgaaatagctacttaaaagcaaatcaaattctcaaatgtttatataatagaaccaatttaacttttaacttaaaaaaataatataatggcttcatttcttaaattctttagtaccaacaaaagcaagattcagacattaaacaagttgaacacaagccaatacaaagacatctaaccagtgtaagaaataaacctgacagtacactttcacagcatcaaggtaagctatttttgtatcagatagtgatatttaaataattatgttcattaaatatttgagaatatgtattagatcaaacttggtgtcctgataatgaacaaatatacaatgaaaatatttttatacaaatctaattattgtttccaggagttatttaatctgttttctctcatttagtatatttagatgaaaatcttatatttgactataagatttgctcactcttttatttcattaataagtactatttctagtggggttttaaaatccttagccactgttctttccctttaaggttactgccattaatatgctgtgttaagatcattagtgttatgagtcatcaggaaaatgcaaatgaaaactacttcacttcagtcagagtagtcatcaagatgagtgagcagccaacacactctggcaaagatgtggggaacgagcaacccttgtctactctcagagtgtagactggtatactactgtagaaatcagcatggagggttctcacaaagcggaaacagagcttccttatgcctgagccatacccttcttggccttattctaagaggaccctaagtcagcacgtcatggaaattgttattcagccatgttggttctcagtgtttactgtagctgggaagtggagtcagcctacctgtcattaacagatgaatgatttaaaaggtggcacttaggcactatggagtcatttccagctgtaaagaaagctggagaagctggagaaggtggtccagtgggtgatgtgctttttgcatgagtgagggcttgagttttgacccccactccacatcccagccagatgagccagtgagtactggtcgctccagcgctgagtggcagagacaggaggttcctggggactcattagcgagcgtgtcggccacaaaccagcctcagaaactaaggcagagaatggattaaggacgacgctctgacattgtctatgtctggccttctacacaagcacacaccagcacacttattccccagcccacatacactaaatgaaaaatgaacttaggacatttgaggaatgtggacagaactggaacttatcttaagtgaagtcaccaagactcagacatatactacagattttctcccttatgcaggtcccagattatgacgcttataaatgtatatgtctcaataactgttctgttgctgtgaagagataccatgaccaagacaacttatagaagagagcattttattggaggtttgcttatagtttcaaagacttagtccattatcatcatgacagggagcatggcagcaggaaggcagacatagtactggggaaagaactgagagctgtctcctggtccacagacagagtaagaccctgggcctgatgggctttagaagcctccaagcccaccccagtgacatactgcctccaacagggccacactcccttaagtaaagctacaccttctaatccttcccaaatagttctagtaactggggatcaaacagttcaagagtatgagccgattattcatgggccattttcattcagatcactacaatgtgtataaatacttatggtttaccttttaatgttaggaatgttttacctaaatatatgtctgaatcatcattttagtcccattcagtatctctttaacctaacatattgattttacattttagaatctaaagaaaattggcctattttggaagatacaaattcaatgccagcctgcattaaacaaagaattttagggtagtctaagccatatagcaagaccctatctcaaaacacaataaggaaaatgtcgcctataaaactattctaatgatgattttaagattaatcatgacaatatatagacatgagcaaataaacattcctaagattgtaagactgactcaaagccctgctgagtattgtaaactgttcatggtcaatatcattcagtaactttagggttttttttaaatacatggcttaaaattaattgtgttttcttgtgagatctttcctataatcaacaatcatttccctctacacttagggaaatatctttggtaacatttatgagcctgtatctctggcaatgtgatgttgctttcagctacaatgcatgtgtgtgaccagaggatagcagaagtgatgtttgttgacttatagctgttattcagtgatgactagctgacatttagtaagacagtaaagatcattatgaaaaataagagaaaccacattattagctaaaagggattttgttttgagatatggttttactatgtatagctgactggaatggaggactctatgtagaccaggctagccttgaactcacagaaatgtacctgcttccacttcctcagtgttgggatcaaaggcatgtacacttatgcccagcccagttagcttagtgtctttgcatctacttttgtatctaataagaaaatataacttgttgtagtggcacccacctttaatcacagcacttaggaggcagaggcaggctgatctctgtgagtttgaggccaggatgatctacataggggattcaggaacattcagagctgctgtagtaagactcagtcttggaggggagaaaaaaaaaagtaggcctattttagctttaactataaaataaggtatttgtatagatataaggtttcatctcacaattaatgtatatctgtctgtacagagtacttgtgaatgaaagtcattgccttggcacacataatcaagaccttcccaataaaatgtatgcacttggtttatttccctcctcttctgaaattctgaaacatttcaaacatgtcagcgaataggagtcagagtggcagaataatgtgagggccctgtgaccttggagaccctgaagagattcagtcctctcagggacacaaatcttaagacaagggaattaaaaccacatcttttctgccaggtaaatgttgtaagattacttgaatcctaataatggctactttacagtggagttgtcatgtattttgctctgaaatgtaaattcacttattatgtgtatataaggcaatggagctaactactagagtcacatttccttcagtgagctagctctcactgaaagttggtacaagacaaggtgggacacaggctcttccactatatggctgaagaattaccaggatcttcttttatttccagatctttaacataaaaggaaaaatcattactgtgacaggtgatgtctttggagtatcataagaataggagcttttgggctggagagatggctcagcggttaagagcactgactgctcttccgaaggtcctgagttcaattcccggcaaccacatggtggctcacaaccatctgtaacaagatctggcgccctcttctggagtgtctgaagacagctacagtgtagttacatataataaataaataaatctttaaaaaaattattaaaaaaaaaaaaaagaataggagcttttcaaaccaggtactgtggcaaatgcctacagtgccaggagttagcctgaggcaagaggtaggtctagtgtcaggaaacacaggaataagcaagccagtaataacgatagtgatggcgtcctttcatcttccactgaatgtgctgggtatgttctttagccttggaccgaggctaccactcttgagtcagtgtgctaggcacgtggccagcatgcttacgtgaaaggcacttcttcaaaaggcgactttcattttattttcccctcttgctctgtgtcttagtgttttgttgctgtgaaaagacactatgaccaaggcaactctaataaaagaaagcatttaattagggccttgcttacaggttcagagggttagtccattgttgccatagcagagagcatggagtcatgaaggcatggtgctggagaagtagctgagagctacatcctgatccaccaacagcatggggtggggaggctgggcctggtgtgagctttcgaaacctccaagccaacctccagcgatacacttcctccaacaaggccacacaacaagaatcacactaagttcactatgaccaattttatttttctgttcaggttaactaaatataaaacaagaaactagttttaaatccgtttatttatgatgaaccagagaacatttaaattgtacaaagtaagtgtgataaagtcatcactttaaaaaatattttctttggatttctcaaaatattttaagattataagcaagatttaatgagtaggagagccagcatattgtgctacagtcagtggtggagatttaagctgtgtgctttacgattaaatgctagggtagagtgggttgtcaaagttacttgagaaacacagttgttctgttttcttatttgtagactgtgctctctctctctctctctctctctctctctctctctctctgtgtgtgtgtgtgtgtgtgtgtgtgtgtgtgtgtgtgtgtgtgtgtgtgtgtgagttctaatgttccgattatttcctggccgccttccactgttccgtcacagattgtggttgtaactcagtgtaggagaattagcaaacacaaagtttctgtctatttaaaagatgtttctgtgcaagcaaaatattttttatttaataaaattactaattttgcttttgtaattgaaatacagctcaagtacaattcctaccagaattatcattattttagtagctttaaaacgatagctgaacttttttccaatcttaaagtgtggtggccatttcaaaccacatgtatgtagtgggaagtataggtcagtgttaggccaacagcctggtgcacagggcctgagttccattcccagtaccacaagcaaacatagacagacatgcaggtctcagagagggagatgatagggcacagactaaaaagcacccaaagccaagtattcaaattggcaacaagcagtgtctgagtgtcatgtgtcttctacaaatctgtgctttcctaatccaaaatctcaaagttcacattcccccaaacagaaatatgatcaggcacatcacagcaacctcccactcctaataccaacttacttggtgtttattgctatgaagagacaccatgcccatggcagctcttagaaaggagagcattgaattggggctggcttatggttcagaggttcagtccattgtcatcaatcatggtgagaagcatggcagcctgcagacagacatggtgctggagaaggagctgagacttctacatctggataggcagcaggaagagagaaagagacactagacttggcttgagtatttgaaacctcaaagcccacccccagtgacacacctcctctaacaaggccacacctaactgtgccacttcctcaaaactaaacattcaagcctgtgtgcctgtgaagaccattcctcttcataccaccacatcatcttgtgtttcagttgatgtgagaatatctgcatacagtcagggacataatccttatgaagaaaagacacttctctggagcagtaggttttaaaatagatttttttttgagagagagagagagacatagtttctctgtgtagccctggttgtcatgggtctcactctatagatcaggctggccttgaactcagagatccacctacctctgccttctgagttctggattaaagatgtgtgccaccactgcccaacaccagatgaatgttttaactttagcttttgtatgaaaaatctttgatttaaaagacggggaaatatagatcatctagggatgaaatgtatacagttaagttagttctttaagaatgaactaaacagagggccagggagacatcactaagcctgactcccagagttaagcctcacaatttacatggtggaagaagaggacaaactccccagatttgtcctttgccttcagcatgtgtgtgttgccttcaggcactcaagtaagtaagtctataataaaggagatgtaagcaggggatggggagcgtgtgatacattacctgggagggaagtgaagtgggcagcctgcataaaggattacactagaaagtaagccgtgcaggcccaagtcagatggcagtttgcaggaatcggctctctccttctaccttgttgggtcccgggactaaacttgggttggcaggcttggcagcaagagcctttacctactgagccatcttgcatgccctccaaaatcactgaagtaactgtgtagattggcagcatctttatgttttattattaatgaagcaaatagtcccgggagcaggagaaacttgggtcggcgttgtctctaccgtagcatctgctcttccagtgtgcgagggtcttttacacagcacaatcttctccaacagaatttaccacaaatacaagtcttacctgtgctgcttgatgagtaattgcgtactaaatgctttagtaacttaaaggtttatatgaataaaataaaaagtaaacggactgtttcagccagcatagcagtaaagttctcgcctagcccgggtccacctggccatatactggatatcaaggggctcgattagctcaggtgagcatcaggaccaaggactgacagctgctgtgtgtgctccctcgcagagctagccactctgtgttgctgctcggtgtctgcagatggcgcttctaaatggaaacagacaggagcttttataattaatgaagacccagattctaggcttttccttgacactacccaaggcagagactgggagttgtggaagcttagctggtgctcacagttctgattcagaagaggaagcacaatttggagcaacactgctgaatggcttgtttgttttggggacttatgcttctgctgtatatagagccatacagcatagagagcgtgcagtctggagtcaggctccctaggttaaaaccatcctccgctggtgagtttgaacaagttgcttaacctctctgtgcttttctggcctgtggtatgatacagctttccttaggttgatacagtcattaaagaaaaacatgcctaagatgtggcgtattaggaaatttggaagtagtagctatagttagcctgactgtatgaagggaactgcttctttccccctaattataatgtaagcagctgctcctttaagagggaggagttgaacctgtgctgtcccagagattcaatgacgctggtgagaaagtgctcataggtatgtgttctgtgtgacttaagcagatatgttgtttcatttgttcttcatcggggaatactaagttaggtttaggtaaagaatgtttaaatttgtgtgtgctgtgtgtacatattgttttcttcagcagtttttcatggacttgcacactgtctagttatatccagcaaagcttactagaaagggtgcctttcacgctataaccagatctttgggcaggtaatgtttaataaattgtattttgtcaacagttctcttattttatgtgtgttttatagatgtgagtgcatgtggtatgtgtccattggaaactagaaaataacctcaggtgtccttattttagctaggctagctggccagagcgctctcagcatctgtctgtctctagggtcatagccatgtccagcttctgagtggatgaaggaactcagcctgagtggcaggtgcagggcagactcagctctcacattttgaatccaaaagagaagtgatcattccggactcaactagcacgtacaccatgacaccctggttcaggctggatgcgagtacacaggacagtatggaaaacatacatttctcggagaaaaactctttatgatgaaaggcaaacacaggaaacatcttttataagaaaaataaagaagtactttcttaaaagatgtttgtgcgggaccataattactcttcaattgaagacggagggccatttgctctgttaaatatgtaatagcacaataaaactaataatgaatgtatacatattcgtgctatttggagtcgtgctagcagaagggtctaagtggctgtgaccatcaaaagttttcttaaaatccatttgttgtcagcttctcagcccagaatcaacaggcagggacatagatgcttttttttctgttaatataattgcaataatactttatcacctaagagtctaggaacttaggtagcagttgggagcctttcgtaccaatgagaacttaggcggtcctagaaatactatgttgactattttctaattattgtgtcatttaatcaatcattaactgtgccagtttccccaaaatggtttagcttgctgtatccataacactttacaggaagcagcacaaaattagtttccatgtgtttctgtggtgtcacaaaatacatatattctacaagtgaagtacttatttttggcaaaaaagaaaaaagaaagaaaaaaaaagaaaggaagaaaagggaaagccaacattacaccaaactgcaattaatgaatataagaatttagaaatcaaaactttgtttagtctgaggaaaaacaattctttcaactatatccacatggcttcttgtttgtatcaactgagggcgactgttactgtcttgtgtgaattctctggggcagggacctggctttgttgaatgagccagttgtttccctttgtgttgcccatctcttaagttccatctggtttgtatcagactgttttcacactgcagcgctgcttctctgtatcctgacactccagagctggactagcaaagctcgctgctgtgatgaccttgctgccagggcctcacagctgtgccccacagcctggagctgttatcagagtagtggtgacatagaacctgggtggctctattcccactggtgtccatgcagtgagcagaagtccatcctccttccccatgcctgaaacttacgacagtggcacatctttcaagctcctgttttagggcatgggatgtcgttgttcttatttttaagtggcttcctgtgtgtgtgtgtgtgtgtgtgtgtgtgtgtgtgtgtgaacgctcatttttcattctatgactcttctaaaagtcaccaggtccagccttagggaggagaactggtcactgtcagacttaattttcattctcaaatttagttaggagtggctagtgtggcagaaaccacttttaagatggcacagatgatatcgtggggttttagtgataatcgtgagccataattttggggaaattttcgtgtttaggaagcatccccgtctcagcaagcagatgatagaaagagattatcttagctttagctccaacttgctttataaacgttactttctttgctttcagcctttgtagctgccaaatgtcacatgtaagaaccttgcaactgagacttccctgcactctgtgacctggtgtaggtctgtcaagtgagatggcaggaatgagcgttgagtaacagttagttatattccagtacagttacagtgcctgccgttccctaggaaactgagaggatgtacagaatgtagtgagacctcaagagatattttcaagattagttaaagctagtttgtttttatttagtttttgtcttttttcacttacagtttgtttttaacgtagatagctatggatagtaaaaacaaaaactaatctttgcctctgaagaggttcatgcctaatattagagtttttaaaggagtttatgtttgacagtaacaaagtgttacatcatcatcaagaatcagttaaaactcaatctactcccttttaattgctgaaactaacctgttgacttttccaattttaattttttatgcatgagtaacatatatgtatgtagagaagtacacatggtcaaagaagcagccccagcagagccccccgtgcacaggcagtgtccagcgggggagagcagcttgtggccaggcccatgatctctcgccatccttccctccacccacaccgacatacctctgtcctgacttgtaggacttgtttgattgtgcgctttatgtaaatgaaatcatacagagtgcatggcttctttcataggtgaacctatcgtaacttttttaaaggttcttttcatttcaaaaccattatggcatgcttttatagaacgttgtctgggggatttgttttagtagctgtctcacaggcgcttgaagtaacaggaagttcactgcagataaagctgtctactaaaacatggtctctcagttctcaaccagacggtagtggtggaatgtccctctagacattcttgcccctaaatggcaggcagtccatgtcataacacttcagagtagtgcactcacgtacttaactgctttttaatgagttttaataattgaatgtacattattaaagtaaattgtggtctgtattcagagtagatggctccatcatcaatttcctgaattaaccagcaactttttggcagttggatagatgcttttgtgctaccagatggtgtctctgaaagtactgttatttcaaagagttgatgtacctacttagacacggagccaataacaacttaatttagaggattgcttgtttaaaaacactaacttgtttttaatgtatttttaaataccctaatagtactcttagtttttattctcagtgaactcaaatttgtattaaaattgaatctatcctgagtgtttttaactttaattgtctccttatttgttttaaattctgaacattcatttcaaagttcacgttttgttttatgaatgaaaaactttaagagggttcatctatatattcctggtagataggtaagggtcttgtagattgtttgttttgtttaataatattgttttgtttttgtttgtttgtttgtttgtttcgagacagggtttctctgtgtagccctggctgtcctggaactcactctgtaaaccaggctggcgtcgaactcagaaatccgcctgcctctgcctcccaagctctgggattaaaggtgtgcgccaccactaccaggcatttaataatattgtacgatagatcttgctttttaggtttttaaattttttttcatatgtgtgtcttgcctatgttatatgtgtgcacacgtgcctgcttgatgcccagaagacattagatcctgaattagagttgtgggtagttgtgatccaccacgtgtgtgccgggaatctgacctgtgtcatctgcaagagcagcaagtgctcttatcttaaccactgagccatctctccatctcctcggatctcgtgtgtgtgtgtgtgtgtgtgtgtgtgagagagagagagagagagagagagagagagagagagagagagagagagatcgtgtgatattaggaatatgtggtaagcaagtcctatactactaagctatatgtatatgcaccccataccttgccacttttaattaaaactgcaaggctacaagattgtgggtggttatttaaaacaaaagattaaagtgctgaaataagatatgtttaggagaagccaagtatggaaaagtggtccatcccaggacatctctgtatgcctttatgacgcatttcaggaagatgctctctctcctggccttgggttccatttccaaatgtaaagtcactagctttgtattccctgctgtcttcagaccttatgtaaaggctaacaagcctgttccaagttactcccatgatatggaggcacttatgcatggtagactcactttgcagtcggtattacccactcaaagtagaagtgtatggatcaaacagacgtgtgtgtctgtcaccctttggcttcagtaccatgtcgagcattaggataaggtaaggtatgctagtagcctcgccactggctctcagatgacatggacttggctataggtcatctttcctcagctgtagagcaagagcccctctcccaggactcccatctaacacatggaagttgagaaactgcttcttgtcagagaataaattacagtcagctctaacactgatagagtggtttctattagtaggaatactgtgaggtaccatgagtctttcccagttttggtagagaggtgttttgtgtttctgtaaagaagatctttttctaagaattattaattttttgatttattaatttttatattttatgtgtatgagtgttttgtctacatgtgtataagtgcaatgtgtgtgcctggtgccatcagaggccacagagggtgccagatctggagttcctgatggttgttaggtcaccgtgtgggtgcaggaaaccccgtgcaggccctctgcagcaagggctcttaaccctggtctctgatggcagcaccagcagtggtggtggtccttgtgacacttccagtatgtggctctcaggagtgtgctgggtttacagaggcccctgaccctcaggaaggactgccccctctctcccgctccatggacacagatggtcggttcttcagtggaagagcctctatcagagttagctccattaagccagcgagaccagacagtagcttctctgctcgctctgggagactcaggaagagcaggaagtgagcagaggttcaccacagttagtgaggcctcagacgctcctgtcagaggcgggtgctcagtccgggccgctatgcagattttgaatgtatgagtgactcgtatttaccatcctcttcataaaaccccatcttctttaaaagtatccttgtgaactttggtttctttttcttgatgtgttctgtgcatttcatattttaaaacacttaattttcagatgttttctgtagtataataatttaaactgaatgtccccagtcagattgtgtggccaagaataatgaaatgggtagtgtttataaactctgtaatttctttttaaaaaccagcatctcactatatagcagtggttctcaaccatcctaatgctgtgacccttcaacacagtttcttatgttattttgaccccaactataaaactatttttattgttacttcataattgtaattttgctactgttatacaatcataatgtaaatatctgtgctttccgatggtcttaggtgacccctgttttaaaagggttggtgggtgacagagggtcacaacccataggctgagaaccactgccatataaacttttgagtgtattggtatagatgtgagccattaagcctggcctaatccttacagtgttgctcacttatgtcttaccttcttataaagtttacctgaagttcttgttgaatgaaggaaagctcaagggccagcaggatggttcagtggttgacgctcctcgcccccgaggactttagttcaatctctggacctgtgggggaaggagaggaatgactgcaaacctgtgcacacatgtgtcccccaacacaaaaacataaatacatataaaatttaaaaagaagcttgagagacagtttttgtatcatagagaaactgataaaagaatactgcttgtactctgtgacacatttttttccccttattgctcagctccaagagtttgtttgaaacagtggttggtggttgttgattgtattttggagtacaggttgacatcatgctatcattgtggtctggttcttagtgttcagcgagttttgttgacctgaggactgacggttaaatagttttatctaacatgcttggggcaggaatattttgattagattatttaaatttcagaatattgatatatacataatgctatctagggatggtgcttatgattaaacatgaaattcactgtgtttcagatataccttacctcatagctcggagataattttatacaatatttttttagtccacaataatggctgtggccacgacatgaggtcagatgtggaattttctattgtgagttcgccgttgggttttgctgatttttggagtgttttggttttcagagttttagagtaggagaattcagcctgtgtgcggctgcatgatttcactttccctgctgcttttcttcctccctcgacatgaagagaggcctgcgttcttcatttaactgctcctcccttggctcaatagtactcccctttgctgcttgagaactggtgggttttcagtgtggcctcagatggccagggcagtggaggtcctaaacttttttttgtaatggttaagtccttaggtgagttatagaatgcaaattataactttctaagaaacagcccatgagtttcgctcacttttttaagaattggattaattttgcgattacctgcagtgtgatccatggctctttgcttcctctcatctcatcttctggataaagataagaatcagttaggcaaggtctcttttgctgatagtcattacattcgtgtgtgtgtgtgtgtgtgtgtgtgtgtgtgtgtgtgtgtgtgtgtgtgtggcttccttctttactaggtcactagacgaagcatctgttgacctagttttatgggaggaactaacggaataagtgcatttggcctgagttctttcttgtgaataggaattgtgattatttctaactaatattttactgggggtgggggagcagagctttgttttaatgtagctcctctgggtgccgtgggtaggacacagaaggagtccagtgtgtgtcttgcctctatatgtacaggtgaggttgctgcttttaaaagccctgcatttggaggtcgtaaagtttcttgcactttcataccatgccttctcttttatcatgagcaaagtagaaacactggtggccatttttaacccttctaaagtgtgtgcatactcacccaggattaaggacgtcagctctctaaaaggtacattagagcccagggaacgaagccttcatccctttggaaagtttgtaaactgctgaattagaagctgcaggtgtggtgtacagagcgccgagggtaatacttggctagttccatctggggaaggttatttgttgggacaggatagagtttaaactttgaagtcagttttaaacaaagcgaagcagctggaagctggcataagaagaaacaagtctttcacattaactattgctgcgttagagaaaaggagctggggttgttttcacaggtgcctgggctttcatttttcctatataagctactacgtttttgtcttaaactgtaaattttaagataagcatttgtcaattcatttgaaaaacaagcagtaataaactcaagtatagcagggcttacatgtctgaaacatacttcagaatgtgatagggaacgttaggaagataactcagccattaaatggctcataaccaaatggataaagtaacctgttgtaacagtttaaaatactcctttaagtatgagagataaaatgtttctagtgactgtggaaagtgaaggcctaggaaactcagtatcctcatgacactgagtgtcatcaccagtgtgcttctgcatcaaaacaggtagcattttgctctcaagcactgataggatgttgcaaagcctgcaggctgggttaagtgtgtgaggagaatttaatgcagcaggagaggttagcagctgcttacacaaggaatcgaagcaagagcagatgagaacaaggtggacaggaaaatgcttccagagcctaataaaacaccacagaaactctgtagcattttcagacagctggaaagcaactgcattgctgggaatagttgctatttttaaaaacaaggtggagagtgaatgcaagcaggctgttaagaagagccataggttcttgaggaagaagcaggttgtttgtttcttagtcagtctacttgatttcaagagcccctatgtgcctagaatcgagctagaactgtgtggaactgtgctatattaaagcatcaagctacatttaatataggcagaaaaatatatattgcagtccctgggagcacatgcctaacagcatggcgggcgcacaagcgagctgggctgggtgcagtggcgcaggcctttagttccagcactgggttccaggcctggggaggcagaagcaagtggatctctgtgagttcaaggccaacctaatatgcatagtctcaggacagacagaactatgtatcaagaccctgtttcaaaaaacaaaacataaaacatctttgtgaaccaactatgctagtcactcagtccctgtccatgctcttgaggaagcattgctcactggatattacagtgcagcttggtgagtagcacaggcaagtgccacccaggattgacaaggaaagacatccctaacattttagcactgctgctgggaacagagcagagggtgggctttacccgccagcctggggtatcaataaaggaataaaataaaatgaaaaaagaaaaacttggtgttgggggtgtggcgaggtgggggtgatttggggagagtttgaggatgagtatggtcaagatatattaaatgttcagagaattaagaaaaacatcttttaataaagtagtcatagaccaattgacccatagatagctataactatgtctcttttccaaactacataggtgaaataatgtttatagttgtatgatattctttcccctggactaattaggacattccatggacctggattaaagattgcagttggttcttttaaactttatctctaactccacagtttataagaaactagtctttactgacatgtttaaaaagcccaaatagagacagtcaaatgtcttaaccactgcgtagtcatcttgtagaacactgtaatttatacatgtgtcttgagccaagtacacgtatcaggatgaggcatttctgactctgtggccatctctggagctgcccagaaaaggcttctttctctctgtctcggctgtgtgaaaggctgtgcttcgtggggtcctcttagcttgcaggtaagagctctaataatgggtcaccaggcacagtccacagccccagattctctagccccagaagacttgtaagatgcgtaattattagtatttctaaaatacacgtaataaatacacacatatctaaatgagcattagaaattctgtattgagtcaggcgtggtggctcacacctttaatcccagcactcgggaggcagaggcaggtggatttctgtgagtcagtccagcctggtctacagcgtgagtcccaagacagccagagctacattgaaagaccctgtctggggtgggggaaaaaaaagtgttgatttacttcatataaattgcttttaggttttgcattccttagtcttataaacccagcagccgagagtggaaaatatgaattttcagtattttaaagcaaaagtttggtattttgaatgttttaaaagtatcttaagttatgtgtctggaagtgtcagatctagcgtctgactccggcatctccaccgtaagtgcatgccaggcttaatgacatactgcaacccctgggatcaaggagtcatcttgtgttcagaccccaaaccagctgttgaaacaatgacatcatagtgtaatgacacaactggaaattctaaagttgaactttaaagcatcaagctacatttaatataggcagaaaaatatatattgctctaatggtgatttattaagatgtcctgttctttatgttttttttttcttttgctctgacagctgtaactgggtgtgaaggtattagcctttttgtctgttaacagtaatcaagtggtactttttaaaataacccgtctaaaattttttcttttaaagttctaaagctgtggttatttaaaaaatattttcatgaacttaaaaaaaaatcttcctagagtatatattagcaaatagcattttataagatggtaccttttattggtataatttttatttaaaatcatggtacaactatttggaggccttccagagtacaaggtcatatgtagcccaggctgagggtctcattagcccaggcagagggtctcacatagcctgggctaaggatgtcattagccctggctaactctaaccccactacggaccctcctgagtgctgctgtgtggtagcgcatgtggcttatgctggaggtgtctgtgttaaacaggcactacaaactaagccacgcccatccccatccctcctttgttctcttgctagtttccatgcagtctcattctcagtgccatttgtagccctcccccagggccgatacctgttgggatggctcctgttcagtacctaggagtaagagctaacttacttgagtgacctttctgtgttccagtagcatttataacaactcaggtgcctaatactcaacaaacccttttgaggccctctcacagctgagaatgggggttcagaaaatgtatgtggctaactgcagtctcttcctgtcttccctgcccttccctgcatctctttagatgctttaatgcattgagctcttccttcctcatttggctgtcagtcctttcacacatccagtcactttgtgagattaggcaggctggagcttttgttttcctcactgctatattctgcggagtctagagcaaagcctggcacacagaagatgctcacttgctgtttgtgggggggctgagaagggggggggataagagcccagctcctccgttccattatctttccttccctttactccccctgcacagaagccttcagggcaaagactatgtcagcccattcttaagctgacctcatgggttcttaaccatgacctatcctaaagggactgtttggggctcatgagatgtgcaagcctggtgaccccctgtactggttagttttgtgtcaacttgacagagctggagttatcacagagaaaggagcttcagttgaggaaatgcctccatgagatgcaattgtaaggcatttttctcaattagtgatcaagggggaaaggccccttgtgggtgggaccatctcagggctggtagtcttggttctataagaaagcaggctgagcaagccaggtgaggcaagccagtaaagaacatccctccatggcctctgcatcagctcctgctccctgacctgcttgagttccagtcctgacttcctttggtgatgaacagcagcatggaagtgtaagccaaataaaccctttcctccccaacttgcttcttggtcatgatgtttgtgcaggaatagaaaccctgactaagacaaattggtaccagcagagtggggtattcctgtggcaacctgaccatgttttggggaggactgtggaaggactttggaactttgggcttgaagatccatccgttgttaagagctctgtcggatgttgtgtaggagcttggaagataatgttgagaacagtgcagaagatggaggcctggcttgtgaagtttcagagggaaaattaaagactcttttcagggacattgctattttggagtttgattattctgtggttctggttagctgggactgaagaatcagttgtgattaacaagataccagaactactaaagcaaaacctttgcattactgggactattgatgctggttagctggagttaagaaattagtggtgattaagaagagaccagcatcattgaggtgacaacttctgggaagtgttttctgaaagcacaaagaggctgtgttccagagatggccaaggttgtactcctgctgcagcaggacttggtaatatgtaagagtcacccaggtggtactggttttgaaggcatgaagggatcatgcaaagcagctgaagctcggcactgtgagaggccatggaaggccattggtgagggtgcagcctcagttgcaaatgaaggcccaggactgaaggggtcatgcagtgttttggagatgccagtaccatgagatgaccaccaagagcagcagcagcactggggtacaggcatctggagcctagaggatgatgtgtgtgctacaaagggcatggctggagaagtgacccaagcccttggaggagcccagaagatcgtgagttggatcccagacattggacggttggagattgatttttgcttttgattgtgactgtgccctgatattttccctcttgaaggaagaaactgttttagtggagcccacagttaagagacttttaattgtaaaaagactttgaattttaaaagagatggatattttaaagagattgaaaatttaagaatatgtaaagactgtgggacttttaaagttatttagaatggggatgaataagattgtaagggttgaggcttactagtgatgtttttgtgtgtcaagttgacaaggggtcaattgtactggttagttttgtgtcaacttgacagagctggagttatcacagagaaaggagcttcagttgaggaaatgcctccatgagatgcaattgtaaggcatttttctcaattagtgatcaagggggaaaggccccttgtgggtgggaccatctcagggctggtagtcttggttctataagaaagcaggctgagcaagccaggtgaggcaagccagtaaagaacatccctccatggcctctgcatcagctcctgctccctgacctgcttgagttccagtcctgacttcctttggtgatgaacagcagcatggaagtgtaagccaaataaaccctttcctccccaacttgcttcttggtcatgatgtttgtgcaggaatagaaaccctgactaagacaccccccaagccacataaaggcaaagggagagaagcagctgcacagagttgccctctgacctccacacgtgtgctgtggcctgcatatgcccccatacgtgtcgtgtacacatgcactcatgagctttaaaaaggaaaggaaccagcgttcttcttagctgccactgtcactacacacacgaacatgaaatcacctccagttcctttttattgtaattaaagacagttacaaacaagtgccaccaattttgaattagacagattacgctcgactttattttgacagtctcttcctgaatacttccctatgactttctctcccatgtcttcacacttccaacatctccccaccgtgttctcgtttcattcaaccctctaggcgattgtagctcattacactaatctgtctgtagctcgttctgtgtttttaaaatggttctacaatctttggaagctttgattccagttgcctgctgtaaagtccatctacgcatcttgtgggcatctatactgatcaaggaatagcaagtccagtctctgatctctatacatctccataggcctctcattcctgtctacttggtccatcagacctgccatttgagcagccccatgctcaatgcttcataagtgccaggctccctccctccaaactatcttgactctctgaccattgccacagacccctctgcttgttcttatctgtatcttttctaaagtgcatttgttcacattagtattttctttgaaatgttttgtgagttctccgtttctttatgcaggggctggccctgccttcatcagcatttcagaactcatgatttttttcagaccagtttgtatttggcaccagaacactgtgccccttgcacacaaacctaaatctgttctgcttgtctcctttgtgttattgccttcccaacacttctaagtcccagctcaacagctacttctacgtgactttaattgtgcacgccccgtctgcactgggatgttaggaacatctggagagtgggcattaccttcgatccttgtgtccactctgtgccatctgagctctggatgcacagcaactccatacagatgtttacacagcacacacctttgaaaagccagttcagggggaaaaaaatgccgggcgtggtggcgcacacctttgatcgcagaggcaggcggatttctgagttcgaggccagcctggtctacagagtgagttccaggacagccagggctatacagagaaaccctgtctcgaaaaaccaaaaaaaagaaaaaaagaaaagaaaaaaagaaaagaaaagccaagccaagccagttcagggctggaaagatggctcagtggttaagagcactgactactcttccaaaggtcttgagttcaattcccagcaaccacatggtggctcacaaccatctgtaataggagccaatgccctcttctggtgcttctgaagacagctacaatgttaccatataaataaaataaatctaaaaaaataaagaagaaaagaaaagccatcttggtcatctgatgtgtcccacaggatcactattagataagagatgggagaaaggtccttaaaatgtttgtcgttaaaatgtttgtaattatgagacttctataagaaattatataattttttgggtcacttgctaatcagaagaggtcatattaaacaatttaatatgtgaatttatgcttatagattatataaagcagtcttgttcggttagataactctatggcaacaatgttgtttgggatagccaagtaactcaaggaatggagttcttcaggctacttggggaagtaacggagtataggggtgggacatctgtcagcggtagactccagtcagtcctgtgctaatctataacttcatcgtagactaagctctgctgctggacgttcctttattggatgcttctcttggttatttgtgtactctaggtcatagctttgtaaaatattagtttattttaacaataattatatcctataagtatttttagatgtgcttttcagagtatcgttattttgattttcatgctatccctgtaggtctaatactgcgtgcaatgtgtggagtagaatttttgtacagattaaatgttttccatgtcaaatgtcaatactatttgaatgaccactttagccttctttcttagacaatgttgtataaaaatgttaactaataatgtactgctgttcagcacctatcagtgagcagttgttcacagatgcatcttcactgagagtccatttagtaggaggaggaggaaagcaaagtgctttgacgaacttgcgcttcagtttggaatgctttcatttgtttcctaatcaggccacttcagttctccatcttcctccttcgacgctcagggctggggttagaggccagcgccacgatgctgccgcgccacgatgctgccgcgccacgatgctgccgcgccacgatgctaccttcggatgtttcctcctctcctaggcttctttttagaagtgattctgtaatcagtagcacacccccactgcggctgctgcagtggcttgcagtctctgatgcagtgagagcgacattagggtctttcatggagacagtggctctgtctgagcactcactgcactggggttttggggtttgaatgatgttgacagtgctgagctctgctctgaggtcgggttccatgtgctctgcaagatgggttctgttctatttaacatgaaaacactgaactttggagtggtaaatggtgacaagagcagagactagctctagcagtctgacttagcatctatactacagttgtatagtaactcttttgacagtttcagacacagctgtgacaattcccccatcacccttttatctcccgtctactcctgctgacccctttcttctcctctgtgtgaactcagtgagggaaaaagcccagtcttgcgtaccataatttttattgcccgttcttctgtaaaaatgttgctttcaagagatccacggtaaagggaaattccaagcaacttgagaaaagacatttccttgtatgcgatccttattctcagggtctcccctactgtgtgggaagaggagagcatgcgtgcaatcagccgctgtctgaatgcctttctcctttgtgcaggtggcccggcagatctgctcctcattgcacatgtgtcacccgccaggatgtctgtgactctaccctctgcgaaccttgaggactgctctcagtccctgagcaccagctccatgcatggcggcaccgaatcctcagggacagacaccttctgagcaggaggagagcagcacaaggttcatgaagactcatgaaggcttacaaggttcatgaagacatgtcactctggctgcagaccatgtctgtatactgttggcctttgaacatatttttaggggaaatatttctaatatattattaagacaaaagtgtcctttgaatatttagtaaggcttttaaataaagtagatataactcaactaagtctggctgtttcttagaagcttggggtaacagggaacagtgaaaagggcatagctttaacctgagaatttatgggttattccttctaacattactgtaacaacagtaatcaagagtaattcagccaggcagtggtggcgcacacctcccgagggcccagcactcgggaggtagaggcaggcggatttctgagtttgaggccagcctggtctacaaagtgagttccagggctacacagagaaaccctgtctcgaaaaaccaaaaaagaagaagaagaagaagaagaagaagaagaagaagaagaagaaactgaccttttctgaatttagagtaaaaccccatctttaacttcctgtccttgtgatggacttgaacagtctttaaaagtggtgtctgctcctgaccagggttacacagactcatttctcagccaaccacctcagaccctttcggaataaggaaagagctgctaacttttgtctccagagcaaggagctgatggctctggagggatgcccacggccaggggtactttgttcactcccgacagggcaggcgatgcgtgctctgtacacctcatagccttaaaacttgtgagatgtgttactagcatctttcagagcttcagtacacaactaaaggagagtgagaaggcgtagctctgcagttaggtttaactctagttcccatatttgcggctgtgctggggaagtgagccccttgtcagctgccttgagttaatgcgtttaataattacttttgaagaatactgaaggtgagcggtggtaagcgttgggggttagatgagggtaggcattgcccaacacgggctggtaccaggtaagagtgcagtaaatggtatccctcatatcttgaaggatttcagcatcctgccctacaggaaacacacagaagaacaatctaacattagcaaaacaaacaaacaaaaaattgcctgcatcacacctatatcacatcacttcatcctcccctcctcttcttcctctttctcccccactctcctcctcttcctcttctttctccccccttccccaaaggcttgggtcatcacagaacagggtggaaagatttcaagtggcagagcagtgggtgctgaaagcaaactggtgttttccagacacaacaaggcaagtaggaatttacagtggctgtggctactgtatgcacaagtcagacacagccccagcatggagggggagaggcggacacagcgccctgctgtagctgtggcgctattggcagttgactgggggaaggagaatcttcaaggaaaaaacggtccctgaaggctccgtgtactgcagtagagggccctacacccatgcacagaccgcagtgtaccgcagtgctgagtggacacggagggtttaaaacgagaaaacgacatgaacacgggagagactggagatggaatggggcggactttcaaagtgcatttgtgtgcatctattaaattctcaaacaaaatgttacctccctaaaatatcctcttctgccagccctgaagcttacgcgctgtagttgcagtccccccagtccccgtctgcctttctgaggattttaaaggttatttagtaggttatcagccctgctccacagtggaaccctagggggcttgagagactaccaaggctccgggctacataccagggattctgggttaattgaccttgggcgaagtccaggcaatggtatttaaagtgaaaaaagatcttttttaaagcaacttcagtgtacacttaaggttgagaattactggagagcaatttagaattccttttacctttagtagggcccagggtctggggatttcttgctgaagttagaaacctgtgcaaaaaaaaaggtctgcgagccttccacatgcatttcctcttaagtcacagcccctcggactgtccgtaggtatttggttactgaaacggtgtgggtttcatctgaggacttattttctttgctggggcacttaaatagactttctgcttaaaatagattcatttaaaccagtggaaggaagcagcgtgctgctttgtgggtcttggtttggtttttggtgctcacggacaaatctgggtggagggaaacggccagacctacctgactgtggctttgcttaaacgttaccctcttcactgtctgcttttccaaaccttttttgcttataaaggattttagcagaaacatgtaatagctcaaaaaaattttttttaaatttagacacattgataatttctcccggccccaatcatagaaaaacctacattttctaattttagattgaaaacacagtctttagcgtatggttcttgtgatgcacttgagactttctattaaaaaatggagtctgctccccagtactgtgcaataagtatgagtcctgaccatgtttacgcacgtgttcctctgccagccacctcaaacccttgtggaatagtgcttaatccttgatactggtccagagatgcctgcaagcatcaggcttcctgcatgcaaggaacagcctcctgcatgcaagcacttttcagtttcctgcttgggtcatgctacacatgcacagacacatgcatgcacacacgtgctcgcacacatgtgatttgttctttggcagttgacatgtacacgctgtatcttggtcatctttactctaacccccacatgctgtgggtgaattgagttgtcccatttcgggctgagcactcaacagtaacctgtctgctgctgtgtactgtaatggtaaattctatacccaaacatctaagcctacaagtgacttctcacgtttgcaagcttttgtggtacaaacttcgtttcttgatttaaaactatttctttaataaaactggctacagccaattactgctaggattagaggtaggtgggttttgagttacctggttgggagtggagaagcggaggagttaggagaccagagagaagaaggaggaagaacgagaggaggagagaggaagccgccatgaggggagatggaccatgaacacgtggccaggagaaacagcaagcatctggggtaccccgatggggaagtggccaggccagcagttagaaaagtagattaggggttatttcccagtaattgccaaaggcaaataaaataaccatagtctgagtctcatttatttgtaagctaatcggagataggcttaaattggatgtactataacacatttacctgggctcttcttgtgcctcagcaatgcgtacttcatcaaggatctttacctcccttcgaagtctgaatagcctcagtttctgtcttcaaaagactagatcttatatgctgctgtccagagtgtatcattgtaattagaggaacagtatcttaagagacgttgcttgacgttgagatgttgaggcaacatcctgatgaacccattaggaactgaaaatacactaagctgtaagtgtgcctagtacaccttaccctgtgagcatcacagcttggcccagcctaccctaggtgcagcgagagcacttatgtaggatacacttgggcagactctaacacagaacccattttgtgaaatgccaaagatttcatgtagtttttttatatgacacagaaactgaaaaaaactggggtgactatcatactttcttaccatcagaaagttgggggactcctcactgaaggttgggcgtacggaccttcaccatcgttaggcactgacacagaagcggcactaaaatgctgagagggggctttcacaccactgttaaacctttttctacttttctttccccactacctgtctccccggcactggtcccagcgtagatatggaggaaccaagtaagaaggaaggctcatggttggatgatgggatgaaagggcagctcaacttgagagagaaacgctctctgctctctgcttcccggcagtagtgtgtgaacttcctctctgagccaactgaatactgagtgagtggtgccaaatgaggctgtaagagctgagagctgcagtcccgccccttaagggacaagccagtagtggctgcacgacaccaggtgattctgatggttctagggatgggaaccattgatagactcatgacctcaagagtttcttgaatgaatggaggaatgcatatgtacaagtggctacgggtagctcattcacacaagaggcgatggcctcctccttcacggtctggctgtccagtcaattgagttgctgaagacttgtccaagtgccttgaaaaggaccagccagtgaggcttgccactgatatgtgacgccttgctggctacatggggacgagtccagggctaatctggaagtctgaagtccgttgagaacgtgttaaatgtgggatatcctgttaggttttccttctctcgtcagtcttaaaatttgtttatgttccgattatatgcccctgaaagggccttttattattgtcttgtgactgtcacttaaaaaaaccctggactcaggggaacaaatcccacttatctttagaactgttttccttggattcaaaagcagctgaattcagatgttttatgatgcctgaaaaaataatacccagaagtcgttctaagatgactttgaaatccctccccttttagtaagaagccttctcctttaggaggatcattttttaagaggaaataattcagtcctcagcattcacattagacattaaatgtacttttaaaaggaaaaggaaggagaagaaaaaactcttgaatgtaagatgaacaagtagacattgcgttccagagacttaaattccccagaagaagaggaaggtgcactttacagtgacgattgcttcgtcctctgtgctgaaagccatttggggctgtaagactgtctgcagccaggtgtatatgagggacagatgtgactcctttcctccctgtgctgaggatgacagggtgtccctcagtagatggctggaagacacatcattatatctttactccatgaggggttaatttcagtcagtcagtttttttttttttaaagatttatttattatatgtgaatacactgtagctgttttctgacacatcagaagagggcaccagatctcatttcaggtggttgtgagccaccatgtggttgctgggatttgaactcaggatcttcagaagagcagttagtgctcttaaccactgagccatctctccagccccccccccgccagtcagtcttattaaggagaaagtgtttgggggtgtggggggtgccagtgtgtgtgtatgtgagtgcacgcacacaacctgtgcatgtaaattaaaggctagaagagaagaatgtatctgcccacgctcatgtgtgaacaggtgcacaggtgcatggatgcacacacgtatgtggactcgtgtttgcatgttgcatggccgtgcggaggccagaggctaacctcgaaaggaaggaagtgagcgaggggatggagtagaaaagatactatctattaaagttaaaagataatattaaaagagaatatctatttctgaaccttattacccttttcacattagaagttctaagagttttctcaactcagctgttttattttgtcctgtgccaaggctagacgcttaactaaggcacagagaggtaatcgctggctggaagatgtcaggtaaagaactaaaagtggatgctctgagctaaaaccacgctgtccctttttacatctcatgaacataaagttttgcgaaaggacccctcaattccattcgtatgatgtccttccttaatcccattttttttctttctgccttagaatgctaaatattctacctctctagagactcaattaggtgtgtcttgaatttatactttaagacataagaaatctttgtttcctccataagctgtcagaaccatttatagttcaaatgaaaggcaacagtctccccaggaagagactcaaactctctttggggattatctaaacaatgtcacgtgtccccttttttctggtccatcttcacataagaaagcataaatcatgtgacccaacaaataaacacaactgacatgttatttctttttctttagagacatcggtcctttaatctcctatttcttagaaaaaaatgctgtcttgaaagcactgaactcctaatgtatatacagtggtattgtgtgtgtaggacgggagagaaaagccatgtaactggaccacatgatcgtccctgctggtttgcgtctcttgtcctgttctgatataaaacccagaaagcgctgctgctgactgggagaatgagcagagctgaaaagcacagccctgtgcttgctgcaggcagagctcagcgccaggaaccgggtactggcttgcaagcacgctgttttattgttgaagtttaatacgtttgctttactggtttagaaatagacagaaggcacaatgtttccccattcatccttcttcagtataaacaccaagtggagataaagctctcttggcataacacgaggctctgaactaacaagagaagccattaaagctcacctggccccaaaaggcttcttaccataaaagctaagcggttatggctggcactctgtggccaagattagttctgggtattggcaggggcttttaattggtcctgctacagagaaggtctatctgaataaaagtaattatacaactggaggagtggcaggggagtgtccctgagtttccaggagcttccctgtgactaagagtgcttgcgtgagtgttgctttgtgagtcccttcaggcaatcgggggctctctctggaactctgagaaagccaaaaggtgaatcttgctcccaaagaaagtccatctcaccttgggtttatcttgtttcctctgtgtaagtgatgtcccaagatgtagcaaactgagatgtaggtttaggatagcagatgggagagaacagcttcagaaggccaaggtaacccagattacaggaacacacacacacacacacacacacacgcacgcacgcacgcacgcacgcacgcacgcacacacacacacacacacgcacacacacacaccccgtgcaaagctcacaatgtctccactccatggtaaagtgcttgaccatggagatgacccatcaagagagcgaggacgtgaagcccacctcctgttgccaagactgaagagcttgatgctgcagagtagagagaacttgagaaagtggcttggagagagaggtgcttgagagagaggggagctctgaggctggggatggtgtgggggtgcccagtgcgaggagctaccgggagatccattggagagctgcagtcttggaggctggggactctctgaagcaaggccacaggaatctaagggtgacagtctctggcctgtagagtcggagcaattgtccgcatgcgcactcgggaacacacacacacacacacacacacacacacacacacacacacacacagagagagagagagagagagagagagagagagagagagagagagagagaaacattctttttctgatcagaagagaccagtgtgtgggaaagagccccgccagagacatttttagtttgctcaaaggactacctcgatgattgacatgacccggctcttgctggatcactaaattctctggagctgagaaaagaaaaaacaaaacaaaacaaaaactcagctaagggatatgccttatttacattagaagaattatagtctcaagaacttaagatgcacccctaaaacagagacagctctagttgctcccctggctgaggaagcctcacctgaacagatctctcctctgggaggatttgctcacttgaacattgcttgagctctctaccatggctccttcctcccatcctgttacctctgtgtagactggagctgtgggctcctggaaaagcgacagagcggacctgctttatctaggccttcctggagggtcctgagttctaagtggaggagacttgaccttgaagttcagagtcttcctgttaacagaagactaggcacttcatcttgtgatgtttttgtgactctgattggccagagggctttttgctaactgggaataagtaagtaactatacagcctacttagaatagatattaggattctacctatcaaagaattcataatatgacaatgtgattacgagattagcactgaaacttgtgtagagacttgagatttaatccaggaatcaaggaacagttggcctctaatggtagatttgaatgggcactggggaaaataacttttagttgtttttgtttgtttaattttatcaatccttaaattagtcctactcattgtctcaggaaaatttgaaaatttactaagttaaaattaaaaaaacaaaacaaaacaacaaaaaaaaaccagccggtcagtgatggcacacacctttaatcccagctcttgggaggcagaggtaggtgaatttctgagtttgaggccagcctggtctacagagtgagttccaggacagccagggctacacagagaaaccctgtctcgaaaaaacaaaaacaaacaaacaaaaaaaaaaccagcaacaacaaaaaaacatatttaggggctagagagttggctcagtggtgaggagcggtttctgccttgtagaagacttgtggtctattctcagctcctatatgatggcctatgactctagtcccatgggatctgatgtcctgttttggcctctgtgggcaccaggcacatacgtggtaaacatatatacatgcaggtaaaacatatggagactagatgaaatcattcttttaaaatatattgttaaacagcatttaatctttctcctctcatattggacgcggatatcttctgcttctaaaagtgcatccaggtaaataaacgatctaacacgtgatttccagagcagcctagaacatagagaatttaacatatgtgaaaacagaaggttgctatggaatgtcttcaagaactatagaccctgtgttgtgtgtggctctgtgtgggacagagatgtttcccagtgatcctaaagacataggagacttagatgtaagaattaacacggccattttcgtgcagtggaagagtcattaggtgtggggctggggacatcctgctactttagcaagagtcctcttttaaacattccccatcacttcatgaggtcacttctaaggtttggtttggttttcttttaatgatgtgctaagttctaaaataccctgttaggagcctgttccaggagtagatttccttagaaaatgacagggtgaccagttcaggacagggactctgcactgttgaggggagtgatctgaggtcaggtggagcatctgtcccagaaggatgcaaactggtaagctgatctgtgaagtcggcttgcaggagaggaggaaggagctggggcgtgacaagctcctgaaagcgtcattgtcatttcctagagtggcccaggatggcctcttaagaaggcagcaattaacggagaatctgcagactgcttgacaactgctagttgccttgtgttgttattggactaacgcctgttcttatatccagcttcacgagagggaccctttgcctataatttaaaatgccgctcggttctgccatcagttgatcgctttttcttttctgttgccagcatctgggagggagcgatggtctgtgaaggctcaggcaggctgtgctgggccacagcaggaggcaggccagccaatgctgcccttgaactttgaggacactctgtcttctccagcatgggaaactcccaattgtctgggcaaacccagaaggcagtgcctgaactgtaatgaacagtcctttcattttgggcgaccagcttttattaataagagtatacttcaaatacaaagtgtaagcattgctacatcacagcagggttgactggagcattcgagaaaacagagtgaagagatgaactctgccatttgccctttatcgtggaccctttctccttgtcagtctgccctccgtttaacgcaggtaaacatactag

SEQ ID NO: 3163 - DNA, 5193 bp, Mus musculus
aaccgaagctgttattctatcaaaatcaagacggcgtgtgtgccggactctgtggagactctgaagactaagttgaggtgtccgaaattgcgtcctgactcgtagaaagaaatctactaagctcttatgagggtggtgttttaaaaaacacgattttaacgttgcctgctcgtctgggtctccttaacaaatcctaaccccgcctccacgtctgttggggttttcagctgcagctctgggtttggaggagtgcgtttttattacggttcccgtggcttctcttttgctcttggcataattcctttgaaatttatttcttcgatgcattaacagactcagtgggatcaagactttttgttttgttttgttttttgtttttgtcgtatttagccctggattaaatgtcaaaatcgaaatttacagctttatggatattttgcctatagactttctaagttaatgactgcttcataattatttttggaactcaggtgtttttcaaattcacttccaccattacttcttttcctggtactcaaggagaaactgcgtccttaagttttgagaagctagaattccctctgttaagaacggcgggacttgatttgtgactaaccagatgaaaaacgttgagtttagcctggaaagggggcaaaggcttaaaatgccagcgaggaaactgcgagagattgtttctccaaaccaagggaataaattggctgtggtggaagatgagctgccccgtgttcctccagccctggctgcaaataaacgtcttgctgttgaaacgaggactagttctaatggaacgttatgtgcaaatgacatctttatttctcagtacaccatgggacagaaagatgctctgagaactgttttaaagcaaaaagctcaaagcatgcctgtttttaaggcggtgaaagtacatctttttgaagacacgagtacagaaaagaatactgttgctcaggagactgaaactccacccaatagaattgattcagctacaactgtggctgcggcaactgccgctgccatcgcaacagcagctcctttgatcaaggtacagagtgatttggaggcaaaggttaattgtgttggagagttacttactaagttacaggagactgataaacagttacagcgcgtgacagagcaccaagccagcgttcagagtaagcaagagaaagtgcactgtcatgaccacgacaagcagatgaacgcgttcatggagcagcatatcaggcaccttgaaaaactacagcaacagcagatagacattcagacccattttattgatgctgcactcaaggctagcagtcttcaacttggcatgtccacgtccagagcagtggggaagtattctggaaaactgggaagccctagtgttgggagcagtgttttttcacacaacacatttgtttctaaacgagtgcctttaagtgaagacacagattttgatgggcagaaatctcctttagagaccccagcacctcgcaggtttgcccctgtacctgtttcaagggatggaaaaataacaaaaagggaaagccctacagaagaaaaagaaaatatggaaatgaacagtcctaaaggaaatgtaagactgttggaacaagtactgaatagtaatgagtgtttgacaagaaagactgaatcatcagatataacctcactaactcagccaaaaatgggatggaatttagagaaaagagacagcactgaaactctacattcacaaatatttccttcctctgaagagcggggaacagctcaagtacccgtgccgaagtataatgatgttgttcatgatcttggccagaagaaacaagcaagtgacatgctccagataaagcaatctccagttaccttgaggctttcagatcatccgcataatcctgccttgctccagacaaccaatacaaggtctgtcttgaaagatgctgcgaagattctgagaggagtacaaaacaataaaaaagtactagaagaaaacctggaagctatcgttcgtgcaaaggatggagctgctatgtattcatttatcaatgctttagctaccaatagagagatgtcagagaaaattaggatcagaaagcaggtagatgaatggattaaaatcatttcagcagaaatccaggatgaacttatgagaaaagattatgaacaaaagagatttgatccaaagaatcaaagaaacaagaaagctctaactatgagtagagatattaaagccaataaccaagaaaaaacggtgaacagatctgtaattccaagaagccattatcaaaagcaaacccaggagcagtttacaagtccacctggcctcttgaagtcagccacaacgttgcaagacgaggattatatgttacagatatatgggaagccagtttatcagggccaccgcagcactcttaagaaaggaccgtatctcagattcagttctccgtctcctaaggccaagccacagaggccaagggtgatagagctagtgaaaggcactaaagtcaagtcagcaaaaacacaaactgactttcatgctgcatcacgtatgaaaatggattctaaaatacagcatcccatcaccgcactacctcatgctgatcagcagtatatggtcagcccaagcagagaaatgcctactgtttcaggtaccctggaaggtcatctaattcctatggcaatcctcttaggacaaacccaaagcaatagtgactccatgccacctgctggagtcactgtaaacaagccacgccccgtgactgtgaccacttctattcctccggcatctcgaaaagggaacgctggagtcaagaaacccaacgtagccattgtagagatgaaatcagagaagaaggaccctccccagctctctgtacagatattacctagtgtggatattgatagcgtttcatacagcagtactgacggggcttcctctccaccaagtcccaaagaagcctctcttcctccactgcacacctggatccagactccagactttatgaaggtggatgaagaagaggtgccccttccaggaactaactttgatgaagtaatcgatgttattcaggaagaagaaaaacgtgatgaaattcctgaatgctctgcaccaatgttggagtttaacagaagtgttaaagttgttcctacaaaatataatggtccttcatttcctcctgtagtttctgcttaccatcccactactgatattttagataaagtaattgagagaaaagaaacattggaaaatagtttaattcagtgggtagaacaagaaataatgtcaagaattatctctgggctctttccactccagcaacaggccagacttgatgccagtgtctcagtaagtgaggcgagcgaaccgtcagcttctgacattggaacaagcagtggagcgctccagcgtatggttgatgccagagttcctgtgaactcggacatggtcagccattttgtcaatgaagctctgactgagaccattgctgtcatgttagctgacagagaagcagagaggcaaagggctgctgccacaagtgttcctggtgatctttcaggaactgaaactaacctgttggcaagagtttgtgctccagtagcgacgccgcagcccactcccccctgctcaccatcacctgtgagggagcacgtgcgagtgaaaacgccagactcttctccctgtgaatccgatccagatgcggcttcttctataaaagagatacgcgttgaaaaaggaagtgatatgcctgctgtcatgcttgttagtacaccaacacgcactcctgtcgctacccctcctccagcagcagctcttaccccaactttgtccgaaacttccattgacaagttgaagttatcaagccctgaacttcccaagccatgggacagtggagacctgccactggatgaagagaatcctaactctcttcaagagcttcctcacccaagagcggttgtaatgtctgtggctaatgaagaacctgagagtgtggacttttctgctcagcctgcacctccggagccagctccctcagcaccacttcctgagggcaccaaggccccttccctccagcgagtaccaagttcaggttcatccaccctggagaacactctgagcactgtcactgaaacagaaacgctagacaggcatatatctgaaggggagatcttatttagctgtggtcaaaacttggctaccaagagacctggggacttgtttctgatgaacataaatgacagcttatccagcactctgcaggatgcccttgaaatggaagatgaccctcccagtgaagggcaggtgattaggaggccccacaaaaagcgtcatgaagatgccatcgttgcccttcttactaagcaacaacgggagttattagtttcacagcaagaggaggacttggataacagcgtgggtgagcttagtgaaggacagaggctcgtgctgaaagcagcagaggacatctcagcaggaccgtccggccaaatgctgccgcccacttctcctgcagagccctcctatcagcacgcagaccctcggctggtattgcagcagtctgacatggcctcaggtaatatttgtgaagatttatgtgccagtcatggtccaatgagcttaagggagctggagttgcagcctgattctaaccttattcttcccataacacacactacaacagcagtcagcgatggtaatttaccagaagcagctgaagatttttctcagtaccaacaaaagcaagattcagacattaaacaagttgaacacaagccaatacaaagacatctaaccagtgtaagaaataaacctgacagtacactttcacagcatcaaggtggcccggcagatctgctcctcattgcacatgtgtcacccgccaggatgtctgtgactctaccctctgcgaaccttgaggactgctctcagtccctgagcaccagctccatgcatggcggcaccgaatcctcagggacagacaccttctgagcaggaggagagcagcacaaggttcatgaagactcatgaaggcttacaaggttcatgaagacatgtcactctggctgcagaccatgtctgtatactgttggcctttgaacatatttttaggggaaatatttctaatatattattaagacaaaagtgtcctttgaatatttagtaaggcttttaaataaagtagatataactca

SEQ ID NO: 3164 - protein, 1453 aa, Mus musculus
FVTNQMKNVEFSLERGQRLKMPARKLREIVSPNQGNKLAVVEDELPRVPPAANKRLAVETRTSSNGTLCANDIFISQYTMGQKDALRTVLKQKAQSMPVFKAVKVHLFEDTSTEKNTVAQETETPPNRIDSATTVAAATAAAIATAAPLIKVQSDLEAKVNCVGELLTKLQETDKQLQRVTEHQASVQSKQEKVHCHDHDKQMNAFMEQHIRHLEKLQQQQIDIQTHFIDAALKASSLQLGMSTSRAVGKYSGKLGSPSVGSSVFSHNTFVSKRVPLSEDTDFDGQKSPLETPAPRRFAPVPVSRDGKITKRESPTEEKENMEMNSPKGNVRLLEQVLNSNECLTRKTESSDITSLTQPKMGWNLEKRDSTETLHSQIFPSSEERGTAQVPVPKYNDVVHDLGQKKQASDMLQIKQSPVTLRLSDHPHNPALLQTTNTRSVLKDAAKILRGVQNNKKVLEENLEAIVRAKDGAAMYSFINATNREMSEKIRIRKQVDEWIKIISAEIQDELMRKDYEQKRFDPKNQRNKKALTMSRDIKANNQEKTVNRSVIPRSHYQKQTQEQFTSPPGLLKSATTLQDEDYMLQIYGKPVYQGHRSTLKKGPYLRFSSPSPKAKPQRPRVIELVKGTKVKSAKTQTDFHAASRMKMDSKIQHPITALPHADQQYMVSPSREMPTVSGTLEGHLIPMAILLGQTQSNSDSMPPAGVTVNKPRPVTVTTSIPPASRKGNAGVKKPNVAIVEMKSEKKDPPQLSVQILPSVDIDSVSYSSTDGASSPPSPKEASLPPLHTWIQTPDFMKVDEEEVPLPGTNFDEVIDVIQEEEKRDEIPECSAPMLEFNRSVKVVPTKYNGPSFPPVVSAYHPTTDILDKVIERKETLENSLIQWVEQEIMSRIISGLFPLQQQARLDASVSVSEASEPSASDIGTSSGALQRMVDARVPVNSDMVSHFVNEALTETIAVMLADREAERQRAAATSVPGDLSGTETNLLARVCAPVATPQPTPPCSPSPVREHVRVKTPDSSPCESDPDAASSIKEIRVEKGSDMPAVMLVSTPTRTPVATPPPAAALTPTLSETSIDKLKLSSPELPKPWDSGDLPLDEENPNSLQELPHPRAVVMSVANEEPESVDFSAQPAPPEPAPSAPLPEGTKAPSLQRVPSSGSSTLENTLSTVTETETLDRHEGEILFSCGQNLATKRPGDLFLMNINDSLSSTLQDALEMEDDPPSEGQVIRRPHKKRHEDAIVLTKQQRELLVSQQEEDLDNSVGELSEGQRLVLKAAEDISAGPSGQMLPPTSPAEPSYQHADPRLVLQQSDMASGNICEDLCASHGPMSLRELELQPDSNLILPITHTTTAVSDGNLPEAAEDFSQYQQKQDSDIKQVEHKPIQRHLTSVRNKPDSTLSQHQGGPADLLLIAHVSPARMSVTLPSANLEDCSQSLSTSSMHGGTESSGTDTF

SEQ ID NO: 3165 - DNA, 141066 bp, Homo sapiens
gttgaggcaggattgcctgagccaaggagtttaaggctgcagtgagctatgatcatgccattgcattccagctcagataaaacagcaagaccctgttaaaaaaaaaaaaaaaaaaaaggaagtggaggtaaggaaggaagaaaggggagggagagagggaaaggagcgtgggagggagggaaaggagcgtgggagggagggagggacttagggaaggagggaagggagggagggagggagggaggaagaaaggaaggaaggaaggtaggaaggaaggaaggtcttaaatcagtaatccaagctcctcctacctcaagcacctaaaaaagaagagcaaaatgaacccaatgaaggaaataaagagcagaaatcaatttaaatgaaaagagaaaaaagaaagagctagttctttgaaaagattaataaaactgacaaacctactagcaagagagaagacacaaattatacatcaggaatgaaacagggtgtacattaatacaggttttgcagacaccaaaaggatacaggaatattacaaacaactctacatacataaacctgacaacttctttatgaagttagtattatcctgatattaaaaccaggcaaagacagtacaaaaaagaaaaccataaaaatatccctcatgaaagatataaaaaagtctattactattaatattagcaaatataattcagcaatatataaaaagaattatacaacttgaccaagaagggtttattccagggatgcaagactggtttaatatttgaaaattaatccgtttaagtccacatattaatagactgaagaagaaaaaccaaatgatcataaacattgatgcagaaaaagtatctgaaaaaatgcaatacccattcatagcaaaatatctcagaaaaaaaggaagatcaatttgataaacagcatgtacaaaaaaacctacagcctacactatacttaatggcaaaagataatactttcccataagattgtgagcaaggacagatgtccactctcaccactcttatctaacatactgctgaaagttctacccagtgcagtgaagcaagaaaaggaaacagacataaagattgtaaaagaaaaaacaaaactgttcctgtttgcatgtaatataattatgaacatgcaaaatcgaaagaatctacaaataaactcctagaattaattaagttcagcagtgtccagtatacacaataagcatatttaaaaaatcaattgtatttctatataccatcaatgaacacatgtatactgaaagtaaaaatacaatatcatttacaattactcaaagaaaaaaaaagatttaggggcaaatctaacaaaacatgtacggacttgtatgtggaaaactaccaaatgctgacaaaagaaggcaaagacctaaacacacagagagacatactgtgtgttcagagatcagaagactcaatatagtaagaatgccaattttcttaaggctgatatacgggcttattgcaatttctatcaaggtcctaacaagatttcttataaatatacacaaatttatatggaaatttatataaaatttatataaaaagcaaagggaccagaatagctaaaacaaatttgaaaaatgaagaataaagtgagaggaattggtctacctgatttcaagacataaagagcctacaataatcaatgctgtgtgccactggtggagggacagacaaatagtcagtggaacataacaaagaatctaataacagattaacaccaaaaaacccaactggccaggtgaggtggctcacacctgtaatcccagcactttgggaggccaagaagggagaattgcttgagcccaggagttcaagaacaacctgggcaacacagcgagaccttgtctgtacaaataattaagaaaattagctgggcatggtgtcacatgcctgtagtcccagttacctgggagtctgaggcaggagaatcatttgagcctgggaggtagaggctgcagtaagccatggttgcgccactacgctccagtctggaaaatagagtgagaccccgtcacacacacacacacacacacacacacacacacacacacacacacacacacacacaaacacatacacacacacacacacaaaaatacactcctgcccaactgatttttgggaaaaaaagatgtgagaactaagtttctcacctaatacaaaaattaactcaaaatggattggggggccaggcatggtggctcatgcctggaattctagcactttgggaggccaaggttggcagatggcttgaggccaggaatttgagaccagcctgggtaacatgacaaaccccgtctttaccaaaaatacacacacaaaaaaaattttagctgggcatggtggcacatacctgtagtcccagctactcaagaggctgaggtaggaaggatggattgcgcccaggaggcagaggctgcagtgagccaagattgtgccactgcactccagcctgggtgacagaccctctctctaaaaaaaggatcaggaatttaatgtaaaatataaaactactaaaacttttatttatttttaataaacacagggtctcaccatgttgcccaggctgtctcaactcctggacttaagcagccctcccatctccacctcccacagggctgggattacaggcgtaagccaccatgattggccaactactaaaacttttagaaaaatattagaaaatctggctttagggctaggcaaagagttcttatatttgacatcaaaaacactataagaggaaaaattaataaattagacttcatgaaaattaaaaatgaaattaaaaaattaaaaacttttgctttatgaaagaacattgagaggatgaaaagctacagaccaggaggaaatatttgcaaactacataactgacaaagaactaataagcagaagatataaagaactctcaaaccccagcagtaaaaacacaaacaatccaattagaaaacaagcaagagccgtaaaaaggtatttcagcaaaaaggaaatacatatggctaataagtacctgaaaagatgttcaacatcattagccattagggaaatgcaaattaaaaccaaaacaagctgctgggtgcggtggctcacgcctgtaatcccagcactttcggaggctgaggcgggcagatcacctgaggtcaggagtttgagactagcctggccaacgtggtgaaaccccatctctactaaaaatacaaaagttagccgggcatggtggtgcatgcctgtggtcccagctactcgggtggctgaggcaagagaattgcttgaacccaggaggtggaggttgcagtgagccgggatcacgccactgcactccaacctgggtgacgagagcaaaaatccatctcaaaaaaaaaaaaaaaaaaacaagctatatacctatcagaatggctaacataaaaacaaaacaaaacaaaaaaacaaaaacagtggcaataccaaatgctagtgaggacatggaaaaactgaatcacttacatattcctgttgggaatgtaaagagtttggcagtttctaaagaagttatacattcatctcccatataaccctgcaattgcattcctgggcatctgtcctagagaaatgaaaatttgtgttcacaggaaatcctatatgtgaatgtttgtagaaactctattcttaataatcaaaaactgaaaacccaaatgttcttcagtgggtgaatggttaaacaaattggtacatctatacctgtaatactattcagcaataaaaaggatgaggtattgatacttgcaaaagcctggaaaattctgctgaggaaaaaagccaatcctaaaaagttaaatactgtataattccacttatacaacattcttgaaataacagaattgcagaaatgaagaacatatggttgccaagggttaaggaatggatgagggaaggagtaggaagaaagtaggtgttgctataagaaggcaacacaagacctttgtaatagaaatattctgtatcttgattgtatcaatattagtatcctggatgtgagtgacattgtactccagttttgtaagatgttaccattgtggaaaactgggtaaaggacacaggggacctttgtgttaattgttggaagtgtatttcaatccacactaacctcaaaataaaaagtttaataataaagaaaaaaaatgttattgtataactttctggtacctgccaaagaacaacatgcagcgtggtagatactgttagcaagcattccaagctagagttcttctggattcccactcagaaaacagtctgaaaagatctaagaactggtaaaacaacttctaaagaagtattaaatgaaatcactgttttgtgagaacttgaaaaaaaatacaagggtaataaaatatgcattaaggaactttgtttaccaataggctcctagctgaaagttcaaaaggtcatctactagacctgagccttttgaattgtcgaataaggacagtacactcactgcacctcaggaggacacccagcaaactggactttctacagttcacatcaaaaaataacacagagctgatttccttcttataatgccaaaatctgttctttttttttttttttttaattccatccttgtatttctttgggttaaaattcttatttattgacttatcaacccgaggtcagagagacagaaagtatgaaatcttttttttttttttttgagacggagttttcgctcttgttgcccaggctggagtgcaatggcacaatctcagcttactgcaatctccgcctcccaggttcaagcgattctcctgcctaagcctcccaagcagttgggattacaggcatgcaccaccacgcccagctaattttctatttttagtagagacgggggtttctccacattggtgaggctggtcttaaactcccgacctcaggtgatcctcctgcctcggcctcccaaagtgctgggattacaggcatgagccactgtgcccagtcgaaagtatgaaatctttaaatgttctctaagtttcatactggtaccctgtgctgcctctacacacatcttgtccttattatatatctcatggtgataaatgatggttgttactaaaaaatctgaaaagacatatatgaggaatgccccaagtgctgttggtatgaatcttctttattcattaatgtattaatatacattacttaaacagtgtatgtttcctcttttcagtgaaataaagtttgtcatactataaaagtaatatatttattgagaatttgaaaaacaaaagatagttctaccattcacagaccactatgttaacactatgatttattttctttagaatcactcaattgtgtattttatttatttatttacttatttttgagatttatttatttatttatttttgagacagagtctcactctgagacccaggctggagtacagtggtgcaatttcagcttactacatcttccgcctcctgggttcaagtgattttgtgcctcagcctcctgagtagctgggattacaggcatgcactaccacacctggctaatttttgtttagtatagatggggtttcaccatgttggccaggttggtcttgaactcccgacctcaggtaatccacccacctcagcctcccaaagtgctgggattacaggcgtgagccactgcacccagaccaatttggtattttttttttccagacctaacagttgaactcaagagctaacaatcagaagttttcttaagtctgcttaaatctctaaagctatcctcggtagtcaccagtatctatcaagattacggtataggccaggcacagtggctcacacctgtaatcccagcacattgggaggccaaggcgggtggatcatttgaggtcaggagtttgagaccagcctggccaacatggtgaaaccccgtctctactaaaaatacaaaaattagccgggcatggtggcacatgcctataatcgcagctactcgggaggctgaggcagaactgcttgaacctgggaggcagaggctgcagtgagctgagattgtgccactgcattccagcctgggtgacagagcgagactttgtctcaaaaaaaaaaaaaaaaaaaaaaaagattatggtatacataattgtaggcaactggttcagagaaaatactggagatgactgagtaaatcaatgattttcagagttacttgctaatttgaggtcttctaaatttttcactattcacttcgcagttatttaatagtaagcttagactaacaaattccaccagccacataaaccacctgatggtgagaacaggtagcagtaatgtggttgttcttttatttgatcctagtttccatatattacagcaaatttatgttactgtggcaaagacccatcaggggttaccttctgattatatccctgaaacctggagagggagagaagaaataagcaaattcaagaatcactggcttagatcttgggaatgattacaatgatgctgttattcttgtggcaaacaaaatatatcctagaaccagggaacttaagaataaagggagatcttatcagtcatcaagctctaaccttttctgatgcatgagtttcctttctgttctggaaaagtagttgtccaacctttgcttgaatgtctccaataaggcctgattcttacctgaaaaatgaggtaatatgattactaagtccccttcaagttctaatagtcttttcaatgaaatgtaaacttctattggctaatcatttatttttttaaagtttcttcctttttagtaagtgaaattagtttcctctattctgaggttacaattctttggcatatgtgttactattaaaaaaaatacttaatgtcatgctatccttatttatccaggtataagtatacattacacttcccttatgattttcctactaattctgggagggatggttcagaaatcttaagaaacttacatgaggtcacttatacagatagtaactggacagctggagcctaactaaggtctttggacttcaaaatccagtattttccccattgcacctataaaatgacctatttaagacctataaaatgtcttataagctattatgacacatatcatctatctaaaaatattttccaaatagccaaatatatgttataagctaagtgactgaccaggtgcagtggctcaatcccagcattttgggaggctgaggtgggtggatagcttgagcccaaaagttctacatcagcctgggcaacatggcaaaaccccatctctacaaaaaatacaaaaatgagccggcatggtggtgtgcacctgtagtcccagctactcaggaggctgaggcaggaggatcacttgagcccaggagcttgaggctgcagtgagccatgatcacgccactgctctcttgcctgggtgacagaaagagaccctgtctcaaagaaaaaacgtataagctaagtcataaaacctagcatcacaaacatgggtgccaacattaggtatttcttggtgggatgcagtaagacagcatcacctatgtggtattctggccaaagtttgatatggctctaatcatgagggaataattaggaaaatctacaacatggaacaatttgtaagacaacctggctggtcttttcaaaagtgtcagtcataaagaaaaggggttgagagggctgatttagagtgagaaaataaggccaggcatgatggttcacgcctgtaatcccagcactttgggaggctgaggtgggcagatcacgtgcggtcaggagttccagaccagcctggccaacatggtgaaaccccatctttactaaaaacacaaaaattatctgggcagagtggcgggtgcctataatcccagctatttgggaggctgaggcagaagaatcacttgaacccaggaggcagaggttgcagtgagctgagaaaataagcctgggcaataaggcgagacctagtttctacaaaaaagtaaaaaattagccagcgtggtggcaagtgcttgtagtcctagctactcaggaggctgagacaggaggattgcctgagctcaggagttgaaggcttcagggagctatgatcatgacagagcaaggccctgtctctggaaaaaaaaaaaaaaagagggaaaggaactaaagagtaatgacaaagagctgtaagatccaaattaagttgtcattttaataattcagagtgcctacactcagatcttaggtcactgtttctttcacataagtttcacctagaaggtaagagttaaactatctccaaggtctctggcgactctgacattgtagttctttcagtacactcataatatacaataaattgtgaacaaacaagtaccacctatgagcccaattacgaagagaaaatgtaactaaaataaaaaataatggccacgtgcggtggctcacgcttgtaatactagcactttggtaggccgaggcgggtgaatcaagtcaggagttcgagaccaacctggccaacatggtgaaaccccgtctctaataaaaatacaaaaaaaattagctgggcgtggtggcgggcgcctgtaatccagctactcaggaggcctgaggcagaagaatcgcttgaacctgggaggcggaggttgcagtgagccaagatcgcgccactgcactccagcctgtgccacagagtgagactttgtctcaaaaaacaacacaaaactcattagagaaactcagcaagttacaaaaaaataataattaaaagggtctttaacgctgagcccttaaagtctttttttttcttttttttttaagacagtcttgatctgtcactcaggctggagcacaatggcgcgatctcagctcactgcaacctccacctgccgggttcaagcaattctcttgcctcagcctcctgagtagctgggactacaggcgcgcgccaccatgcccagttaattttttgtattttcagtagaggcggggtttcaccttgctggccaggctggtctcgaactcctgatctcgtgatccgcccgccttggcctcccaaagtgctgggattacaggcgtgagccaccgcgctcagactttaaagtccattttaagtctagacttctatgaaggtagactgccgagatgtaaaagaaataaaattagttatttagcttttagatcggattacattttctgctttgattattctaaagcctccagtaaggcgtaaagggaaagctctaagtagcgcatcctgggaaatgagcagatcagggaaggggtgttagacctggtattatgtctaaagacgattttcatttaaaggaggatcttcccacgggcagctcaaggtcacatcgtaaataccttatagtctaattcagtgtcccaaaacaggaccctgactccccagatccgggttgggggtggctcagggcctaaagttcctaccctcgcccaggtgacaccatctccaggaaggtctgcacccgacccggcgaagcgctgtcccgcttcgcaccccccactgctccaggtacgtgcggcggcctcctcgggagaccccgccactttcctggagcgtagcctgccaccccccgtccgggaaccccggattctcacggcagagaacagacaccatacttaagcacaggctctcgcagccgacatcagtacaaggctggcggttgttgggggacggttgagccttgggagggagggtcagggtctggacaggagccgcggccgccagatgggaaagaacacgtgggagcagtaatgtcaagtgacacttaaacccttagacgccgattcgttataacgcgaggaaatctagaagaaaaagcaggtaccatcagcgaattctaaaatctcctaaggattaacttcggttattttctgcttagacaacgctttctattcccgacttcctctccaataatgacccgaatctgtcgaaacttcttggaagcctaatttacctaatcccacgtccctaacggtcttcggaagcgaagcagtgtcaacagtccctggtaaacacaagtagtattacaagtcgggagctcttcaagtcttggatgagactgtagagcggtcttgtgcggcaatgtgctaccttaaaataaataaataaataaacccctgttatgtccggagtttgtttccacccggagaggaatggaagagcaccagagagcgcttagctttctggttggatgttttgggtgagtttcttggcgcgcatgcgtgttgtgtctcaagggcgggtttgaagggaagtgggtgttgacctgcgggcaactgacgctgttgtcagattacacccacgacggtgcgggtctcgggcgttctggagatacgtaggggtgaatttatgtttccgacgattgcatctggaggggtgtgtaagactctgtggctgaagaaagctattacgcttcttatgcgggtcattattttaaaaatagcatttcgcttttatttgcttgactgcctcttctcaacaaattttaagcccgccactacatgtgtttggttttgccctaccagctctggggttggggagtgcactgttatggttattgttgctcctgtggccattctcttgtcatccccactttcacattttggcgtggtgtattaatagactgagtgggattaatgggtaaatatgactttatagtcagctctaatcctggattcaatatcagaatttagattttcagctttgtggatgttcgacattttaaaaacagttattgcaaagaggtgaaaattttgttctgaagtcttaaggaaacagagaaagtttttccgtccttaagtgtgggacttgttttgtgaccaacaatatgaaaggctctgaggtcagcttggagaagaaaaaaaagattaagatgccagtgaagagacttcgtgaggtagtttctcaaaatcatggagatcatttggttttgctgaaagatgagttgccctgtgttcctccggcattgtctgcaaataaacgtcttcctgttggaacggggactagtttgaatggaacatcacgtggtatgtgattccatgtagtttttcaaccagttttagtttagtaaatctttagtccttatttgtttaaattcccaaacgtaagatataagtctagtttgtacagatgtttgaaaactgaccctgtttcccgggaaaatggccaggaagcctataaaatgtttgaatagatggaatgaatgaaactttaacgtcccctgttgtgctttttttttttttttttgcattgacttttgcatatttttttttttatatttatggtggatacacttaacttatataatgtgctttattttcccccacgtagtgttttttatagttttcccccaaagtagtgctttttacctaattcactactttcttttcatagtgggaaaagcaggacttctgccaattgatggcttctatattccaattcacttaatctgtctagagctcagtgaaaataaggataacatatgctttacccacttcgctgctaattgtgaggattaaattaatgaatatgtgagcaaaaacagcaaaacgcttttgtaatgctgttctttgggggatacagcggtgacactcaaatagtactgctgttaaattagacctttacatcgtatacatatttctacccatagtttgtccacatccaatagtgtatggttatattttaaaatgtttcgtgcttaatctcactttattgtcagtaccgaaccttattttcccaaatatcaactgtaaaaactttcattcagatatgtttaaatacattttcttaactttttttgcatgcaaattgtctttccaacttctgcgttatatggagtttatagatcttgaatcatgcatatacagtttctaaagctaaggatctgattttaaaatcactaaaatctattcctttgttttgttaggttcatcagacttaacttctgctagaaattgttaccagcctctattagaaaatcccatggtgtcagaaagtgtaagcaaaaggattcttaattatgctcacgttaaaattttcagtattgtcaaataatgcattcttaaattatgtttgattagcagcatgccttgtttttatttaaatatcacttaccaaaacaaatgttttatatactacaattgtgactttgaatggtgtttgagacattaaacaaaaggccttccctagaatcaaaaatacctattagtaagataatggccgctgaaagagataggataactgaaaagaaactctcttactattcagggaaaaggtgttcttgcccagagacttaacatgttcttaggtaaaagaaaaggaacaactaacagtacaatttttctttaatgtgaggtgtgcttgcatgtcattctaacacttgtgagaatggttttggttttcttagaagggaggttctttaagaataacatgaaattatcatcttaactttataatgccgaaagtatttgataaatacaatgttttggttatgagatctaatcagactttgacggctaatcatagtgttgacctatgtattgtcagtttaataagtctgtataatgagagtttcacaatatgctattttgaaaattgaagctggcaaactaataattcaattgagactatatgacaattttgtcaaaagctcacaataaaatgtataattatttgctgtacttgatccctaagtaaatgcctagactttggagtgtttttttgttgttttgtcttttttttttttaagcaggccttatttaatgatatctaaacttctcaaatgtatggatacactgttattgtataattgagaataaatgggtgatcttcgtgatgttgtgccatccttatctactccatttgactcacagtgagtcagattttcacatttcactgaagcaactgagatgttaaatgacttgctctgctacaagtggcaaactggtttgagtctgaatctcagtgctacatttgcttgctggttcatttactcattcattcacttgtctgatagtgtattactcacccattcaacaaatctttgagtagctttaaggtacatcagaattgcatgatgatggaaatgaagaatatgaaatacacagtcctgccctcccagaacacagtagtcacatagctagtaaacggttcttgataaataataaatcatgaagtttatttagcctatttcttcctttcatatcccaaaggatttttctaaagacgttgcagtgcaagtgttgcctttggataaaatagaagagaacaacaagcaaaaaggtaaaagaataatattgatttttttaaattgtgacaacatatacataacataaagtttactactttaaaatgtacagttctgtgacagtaagtacattcacattgttgtacaatcatcatcacctttcatatccagagctttgtcatctctcccaactctacccattaaacactaactgctcatttttcatcccctcagccctgggcatcctactttttgtctctatgaatttgactaccctaggtacgttatataagtagaatcatatagtatttgaccttttgtgactggcttatttcacttagcataatgttttaaaggttcatccatgttgtagtatgtgtcagaattttcttcttaagggtagaatttatttttaaacatttattacgtagtcttatagtttttattattttcattttaaattagtttttcttcccaaattaagctatcactagaagctataaaatccagaataaggtttgcaatggtgaaggttatcttgttattaccaacctattgcagaggtttagtattagatatgtttataaattttttttttgagacggagtctccctctgttgtccaggctggggtgcagtggcgtaatctcagctcactgcaacctccagctcccgggttcaagcaattgtcctgcctcagcctcctgagtagctgggattacaggtgcacaccaccacacccagctaatttttctattttttttttgtagagacagggtttcaccatcttgaccagactggtctcaaactcctgacctcaagtgatctgcctacctcagcctcctaaagtgttgggattacaggcgtgagccaccgtgtctggctccatatgaattttaaaatagttttttctaattctgtgaaaaatgatgttggtaattgaataggaattgcattgaatctgtagatggctttgggcagtatggtcattttaacgatattgatttttctaattcatgagcatggaatgttttccacttatttgtgtcatctgtgatttttttcatcagtgttttatagttctccttgtagagatctttcaccttcttgattaaatgtattcctaggaattttattttttgtgtgccgctgttgtaaatggcattgagttcttgatttcattctcagcttgaatgttattagtgtatagaaacgctactgatttttgtacgttgattttgtatcctgaaactttacttaagtcatttatcagatctaggggcattttgtaggaatctttagggttttctaggtataggaccatgtcatcagtgaacagaggtaattggacttccttttactttttggatgccttttctttctttctctgtctgattgctctggctgggacttccactactgtattgaaaagagtggtaagagtgggcatccttgtcttgttctagttcttagggggaatgtgttcaacttttgcccgttcagtatgatgttggctgtgggtttgggattatgaggattatattattacttaatcacttaatttgttccttgtccttttcgatcgtggaatgctatggctgagttcctaaacattcttttagttaaaaaagatttttttagtagcttattaaagtttaataaatattcaggaatttaatatatatttttgtgtcttgattttgcagcaaatgacatcttcatttctcagtatacaatgggacagaaagatgctctaagaacagttttaaagcaaaagtaagtttcatttacagaaaataattggaccatttcttatgtaaatcagcttcatttgtactttggacatatgaaaaaccttttcactatgtgaaatatatattgtgtgatatgtataaagcatttctcatggtgctagacacgtataaaatactcagtagcagttagcagttattattatggaagtgctatagtattaactcatttaacacacttataaaatagatttactatcccaattttatagaatccccattttcttttatttatttatttatttagagatggagtctcgcgtcgcccaggctggagtgcagtggcacaatctcggctcactgcaacctctgcctcccaggttcaagcaatctcctgcctcagtctcccaagtagctgggattacaggcacctgccatcatgcccagctaatttttgtatatttgtagagatggggtttcactatgttggccaggctggtcttgaactcctggcctcaggtgatctacctgcttcggccctgcaaagtgctggggttacaggcgtgagccagtgcgccctgtggttaatttaattttgcgttagaatctaaggaagagccacactttacatttgaatgatatgtctcttaagtttgtttttgtttttgttttttttaagacagggtctcgctctgttgcctaggctggactgcaacctccacctcctgggttcaaacaattctcctgcctcagcctcctgagtagctgggattacaggcacacactaccacgcctggctattatttgtatttttagtagagatgaggtttcaccatgttggttaggctggtctcaaactcctgacctcaggtgatccgcccaccttggtctcccacagtgctgggattacaggtgtgagccaccatgatcagccttcagtttgttttaatctacagatttacccttatttcgtttttcttataatttgtttgtcttaagaaattttctaccttctggattttgctgaatgtatccttttgttgtctttaacatgtttctttcaaccttgaatttctgtcaagtggcaagaatgcttgataggtgatattatatacttcctgtgtaatacatcgggatacatagatatctgattttatctcttattgtgaaattaggattgatctgttaatacaccacctttttgtatcaaattacagcatatggaaatttgaggacaaagagtctaaacagtcaattttagaaatttagcaggaaaataatttcttataaaagctgaaggaagctgggcatggtggctcatgcctgtagtcctagcactttgggagtccaagacaggaggatcacttgagcccaagagtttgagaccagtctgggcaatatagctaatttttttaaattagccagatatggtggtgtgtgcctgtagtcccaggtacttgggaggctgaggtggaaggatcacttgggcctaggagtttgaggatgccatgagccatgttcatgccactgcactccagcctgggtgacagaatgagaccccgtctcatcagaaaaatagggagacagacagacagacagatgctgaatgataggaaaaaagcagggaaagcagaagaaatcaagtataccagataaaagaaaacataaacacagtagaatgttttcaactagttctagaagtacgtcagtgtaataagcaaatcttggacaagtctaagtcagaaaactggtgagagaatgcatgttagaagtaaaaagaggacataatgatagacttagaaggtattaagaatacagtgtattaagaatactgtgtacatgaatgctacaaattaagaaatctagatgaaagaaataactcaccaaaaataaccatataactaagaagattttaataggccagttactgggaaataaatttaaaaaaaaccttcaaagagcaatctccaaaagcagtcatgattttgtttgagttcttgaaaaattttaagaaacagattatgatcatgctatatattctgctccagagcaatgaaaagcaaagaatgcccctcatgtcattttatgatgctaacctagcccaagtatcaacacctaacaattagtttcatcagagatattttcatcatgctattgtaatttaaacaaacctagttctttaaataagttatgagtaaattatattttatcatatgttaaaagattaatacacagtgattggaatgcagcaatgttttaaaaatggtaatagcaaattctgatgtaacacttatgcaccagccactgtcctctgcacttctttatttttgttttactttctgttttttattttgttgagacaggatctcgctctgtcacccaggctggagttcatgggtaggttcacggctcactgcagccttgacctcccaggctcaagtaatcctacaacctgaggtccccctaaccgcccccccgccagagtagctgggactacaggcatgtgccaccacatccagctaacttttttactttttgtagatatagggtctcactatattgcccaggctggtctcaaactcctgggcacaagaagtcctcccgtctcagcctttgaaagtgcttgaattacaggcatgagccaacatacctggctgcacttcttacatactacttgatctttacaaaagcctagcacgtctaataatgtttcaagcttaaggaatagaagggtttaagtcacccaggcagtctctctccagagacagtgctcttaaccattgcgccactacaataattcatgatctattaatacatttatatcatttgatcaaataagaaaatatatgtggcaagcactacagtcacatttaatgacattttatgcccatatcttcttaatttttttattttttaaattgacaaataattgtacctatttgtagggtacgtagtgttgtacttataatgtgtagtgatcagatcatggtaattagcatatccatcatctgaaacatttatcatttctttgtgttaggaaccttcaatatcctccttttaaccgtgtaacacattattgttaactatactcatcctactatagtcattcctcctatctagctgtaacgtattcctgacttattcctcctatgtagctgtaattttgtatcctttaacaaatctctccctatgccccccttccatacccattttatactcagtcaccacatacacacataatacccacaaacttctttaagaatagaatgatacattccttttttgtttttttaagatggagtttcactcttgtcacccaggctggaatgcaacggtgtgatcttggctcactgcaacctccgcctccccagttcaagtgattctcctccctcagcctcctgagtaactgggattacaggcatgtgccaccatgcccggctgattttttgtatttttagtagagacggggttttgccatgttagccaggctggtctcaaactcctgaccttaggcgatctgcccaccttggccttctaaagtgctgggattacaggcttgacccatcgtgcccagccagaatgatacattcttaacatgaaggacaatgtttattggaaacctgcagtcaataccctgtttaacagtaaaattgggaacaagacaagatgtccattattttttaaacttaatttggaagccttagttgtagcagttagataagaaaatgaaatcagttatggatattgaaaaagaggaggcaaagttataatttgtagaaaatattgtgtattcagaatatccaagagaccactaactcagaaatttttacactaatggaagttcaggaaggtgaccagatactcagcatattattcaataataaaatgaaataacaattaccatagcaatgtccccaccgaaaaaaaaaaagttgggaatactcataaccagaagtctatagaatctgtctgaagaagtatgaaattttgtcaagggaaataaccaaaggctaagataaattaagagactcaacatgttcttggatgggaagactaagcgctgtaaaaatacaagttattacaaaattagcatatgtttggctgtggtcagtcttaaaattttttgttattttgagaataagtggtagatgtaaattggaaatgtaattctaacacttacctagaagaacatactgttgagaaaaaaaaagtatgtgcctgtgtgtatactgtatgtatatatttatactgtatatgtgtgtatatacatacacacagaattaaggatacatccatatagaatacattcagtttggaatagctaagataaatttggaaaagcaaaaacaaaaatgggatgatggagaacttgccttaattgatattataatgtactctaaagccttagaggaatgaagaatctggctagagtgtctagaacaacgggagaactcccttgtgtgtgactggagagataagcaagggactaggttatgaactcccctaaaggaatttggtctttaatataagataaatggcaaatcattgaaaagttttaaagaattagatatatttcttaaaatactcactctggtagccatatgaagaaatggattggaagagggctagactatagtccagcaaatgaattggctctggagttttcagggaggagtgagttagattggtcctgaatacactgggcagtggtggtatggtaatgggaatcatgctcagttggagaggaagagacaaatttggaagatgattaggagattgaattgacaggaatcattaattagatatgagggtaaggaaggcactaaggttgaatcccagatttttggctttcacaaatacatggtgagtagtattactcattgagaaaggaaatccttgtgggggataacttattctgggcatgggcaagggtttgaggttcctgtgagaaatgtgggtaagaagtgttcaggagaaaatggaatataaaggtcaagttgccagacagtggctcatgcctataatctcagcactttgggaggtcaagctgggaggatggcttgaacctaggagtttgagatcagcctgggcaacatagcaagaccccatctctaaaaacaataaattagccaggtggggtggcatgtgcttgtactcctcattacttgagaggctgaggcaggaggatcacttgagcccaagaggttgaggctgcagtgagccatggttatgctaatacactccagcctgggtgacagtgagatcctgtctcaaaaaaaaaaaaaaaaaaaaaaaaggccaagttcacaaaagggatccaagctggaaattaagatgcagaagtcatcattatgtaagtggtagtctaagtctaagctctgggaatagttgaagtgattcaatgaggttatgatagtgaaagagagatggctagggctggatgcattctgagaaaaccaaacatttaaggagtatgtggagaaagcaagctagcttctaaatgctgctcagaaagtttggccagagatgtagggggtatggtgttaacaaagccaaggggaattaggttccaagtgtgatatgctgctccgaggtaatggaagctaagtactgaaaaatacactgaattgagcaagcaggattcttagtggctttggtgagaatagttgcagcatagcattgggatgttcagtgggtttaagaataaagaaaaactggctaaaaaagaagactagaatgaaataattgcttcttaatgggagggttatgtgcatttttttgacatttatatgtcgtagctctttacatttgccacattgagcatttattaatgtaataattggaaaaaataaaatttaaaagcctataaagaaatttatgtctagccttataatgtttctcttattgggcaaaggtaagtcactttcagacttcaggcagaaaccttaaaaataaggaattcctgaattatattttcatactctacccctcaattggttaaatatatatattgagcacttactacatacctaaccctttgttacttgctgtttggtatgaaagaagtcctgctaccattcccaaccccaggttgcttacagcttaattggggagataatatgtatatatatggaagaattagtgattaattacattcaatatattattaaattgtcccatacagatatttaaaccctgggatggctaagtagcaagcctccgttgataggtagtaaatgcaaaaggagttaatgaagggagagatcaagaggaagtgctagaagaacaggcttcttgaagaaggtagtacttgcattgcaccttaaaggaggagaaggatgtaataagttgggtggaagaagggtgagagagcagagtgaggcaaagtgtggagtcacttgtgggcatggcatggtatatgtagttagtgaggagtgcctcgtgtatggaaagccaaacagaggaaattagccaattcagttgtttataaggaataattttagatttttgaatggtgacgtgtaggaagtttctaagcaagtagaaactggaagaatggaatagttagtaataggtgatgaaaccttacggttgagagagagaagtgagaagggaaatgtgccaaactgagagaaaaagccctggtgtcatggtaagacctctgggaattgggccctaactctaccacttaataaatagttctatgacagtgatcaagtaaatcctgttacctctgtggactgccattgctttttttctttctttttttttgagacggagtctcgctctattgcccacgctggagtgcagtggcgtgatctcggttcactgcaagctccaactcctgggttcacgccattctccttcctcagcctccgtagtagctgtgactacaggcgcctgccaccacgcccggctacttttttgtattttttagtagagatggggtttcaccgtgttagccaggatggtctcgatctcctgacctcgtgatccgcccgcctcagcctcccaaagtgctgggattacaggcgtgagccaccgcgcctggccagactgccatttcttcatctgtaaaattaggaaattaggatatcctgtgacctctgtggactgcaatttcttcatctataaaattaggaaattaggatggatgtcctataagtttctctcagctctataattctatgacactcttcatgcaattgtgatgaaataattgacaactctttatgattcaattgggtatgagacggtaagcaagtagagaagtcaagatgacttcaacattttgagactgagagaaaaatgttattcttagtagaaatggggaaatatcaaagaggagtaagtttaagagttctgtgatgcccttaaaagtcgacggggaagtccagcagctggagatggaatgtattcctgccaattttacttagactctcttagggactcttcagttttgtcagtggttcctttcattgttttctttgaggccaaataccgagcaaattggctagccttcttttttctttcagtatttaattaaatgccttattgcaagtatgtatctatttgctggacttgttttcatttcagggtctttttttaatttttaattttttttttttttttctagagacagggtttgccatgttgcccagctggtcttgaactcctgggctcaagcagtcttcctgcctcagcctcccacagtgctaggattacaggcatgtagcactacacccacctaattcaggcttcttaataatgtattttgtgaacattttaataaactgagtgaccttcctttctttctgtcttgctttgctctgctctgcttttctcttttcttctttctctctctctctctcttcctccctccctccctctttcctgtcctgtcctgtcctttctttagactgagtttcgctcttgtcgcccaggctggaatgcaatggtgtgatctctgctcactgcaacctccgtctcctgggttcaagcgattctcctgcctcagcctcctgagtagctggtattacaggctcccgccatcacgcctggctaattttttgtatttttagtagagacagggttcaccatgttggtcaggctggtctcaaactcctgacctcaggtgatccacccgccttagcctcccaaagagctgggattacaggcgtgagccactgtgcctggcctacctgagtgatatttgttaagtaaatctaaatgacctagaattcagaaaattcttttcagtggtgttatcaatccctcttggggacattatgctaagtgaaataagccaggcacagaaagatgaatatcatgtattctcatttacatgtggaatctgaaaaagtcagacttatagaagcagaaagtagaatggtggttgccaggggctgggggtggggagaaagtgggggatagaggtcaaaaggtataatttctcttagacagggttaatacattctagagatctattgtacagcatgtaactatggttaataataatgaattgtatacttgaaaattgctaagacagtagatcttaaatgttctcatcacataaaaagataattatgtgaagtgatgggtatgctaatagcttgactataatcgttttacaatgtatacatatatcaaaatatcacactgtaaatatatacaatttttttcaattatacctcagtaaagtgggataaaaaatagtcacaaagtgtacatcaatagtgctgtaattcttacaattctttttttttttttttttttctgggacagtgtctcactttgtctcacaggctggagtgatcacagtggggtgatcacaactcactgcagtctctacctcctcaggctcatgagatcctcccacctcagcctcccgagtagctgggactacaggtgtgtgccaccacacctggctaatttttgtattttttgtagagtcaggattttgccatgttgcccaggctggtctcgaactcctggccttaagctatctgcccaccttggcctcccaaagtgctgggataacatgtgctagccactgcacctggccgataatgttataattcttatataaatatttggaggatgaaattatcaataatggaaaaaccacagcagcttgtctgaaggtaataagttatctcaattgattgttcacagtcagttacagaccaaactttttgttttattttatttttctggagacagagtctcgctgtgtcacccaggctagagtgcagtggtgccatctaggctcactgcaacctccgctgcccagattcaagtgattctcctgcctcagcctcgtgagtagctgggattacaggcatacaccaccatgcccagcgaattttttgtattttagtagagatggggtttcaccatgttgcctaggctagtctcaaactcctgagctccggtgatccacctgccttggcctcccaaagtgctagcgttataggcctgagccaccacacccggcacagaccagacttactccactttttctccccttctcactgctgtacttgactagtctttaaaaaaataataaaagaaaaaagaaaacaatagtgtttcttgggttgtctgcctttaggagtaaagcttggtactttaattcttggagctttttctgagtagttttttttgtttgtttgttttgtttgtttgttttgagacagagtctcactgtgtcacccaggctggagtgcagtggcgcaatcctggctcactgcaaccttcgcctcctgggttctagtaattctcctgcctcagcctcctgagtggctaggactacaggcgcatgccaccacgcccggctaatttttgtatttttagtagagacggggtttcgccacgttagccaggctggcctctaactcctgacctggtgatccacccgccttggcctcccaaattgggattacaggcataatcccaccgtgccaccttgtgagtgttttaaatttgtacttcttgaaaatgtctttataattgtgctatgcctttttcatatgtttaattcttattttccaaaataatattgctaccttcaaggaattatcttcttatttctttagcccttagtgacctggaccttgataaattttgttaaccaaatgaccttgtttgataggtgatttaattaaaaaaaatcaaaaccaccttcggcagattaccatttgttaagtatttcttgaaatgtttcaatgtagtttactgaatacatttttattgcttttttatttatagagctcaaagcatgcctgtttttaaggaagtaaaggtacatctgttagaagatgcaggcatagagaaggatgctgttactcaggagactagaatttcacccagtggaattgattcagctacaaccgtggctgcagcaactgctgctgccattgcaaccgcagctccgttgataaaggtatatttttcttcccagataatcataactactttgtgaaatatagaagtacttactaagaactgattctataaatggttgtgtccagttatagactaggaacattgtagttgctctcaatttgaaagaattttcccatttgtggttgtgtgttacttctcaggaaatgtgaaaattaccctctaatactgtgatggcactggtgaatttagaactttcccagttttagcactgagagtcctacatcctgggaaacaccttggtcctggcaacctggataatcggttattcttatttgagagctagaggaaccttagagataatctatgccttagctgtcgctttgtaaatggggaagcagagaaacaggtcagagtaggcctatgagtctagaacgagtaagtgacagagccaaaactagaactcaaggctgctgacctaactcagccttatgttagtaaaatatcaaaagctactttgctttgctgttttcttctttttaatttccatttaagtgtcttgttttaggcatcataaaattatttgtggcagatttgtttgagacggagtctcactctgttgcccaggctgaagtgcagtggtgcgatctcagctcactgcaacctccgcctcctgggttcacgtgattcctctgcctcagcctcccgagtagctgggactacaggccgcacgccaccatgcctggctaattttttgtattttagtagagatgggggtttcaccgtgttggtcaggatggtctcgatctcctgacctcgtgatctgcctgccttggcctcccaaagtgctgggattagaggtgtgagccaccgcgcctggccaatttttttttcttttgtttgagaggaaacatttacctaaggatagctatcttctgcctttcatttctgtgactctaaaaataaaggcattaaatcattagaaatttagtgggtaaaggctcaaattagatcacttatcaatgccaattgatttaaataacatttctagtaattagacatatttttggtatcctataatgtgaatttttaaaaatgtttttattgttttaggtgcagagtgatttggaagcaaaagtcaattctgttacagaattacttagtaaattacaggagactgataaacacctgcaacgtgttacagagcagcaaacaagcattcagaggaaacaagagaaattacattgtcatgatcacgaaaagcaaatgaatgtgtttatggagcagcacataaggcatcttgaaaagttacaacaacaacaaatagatattcaggtatctgtaataaatccagtacagattccataatcttttatcacttggatctctcagccagtattcattgataattacagtagctcattagattgtaacagttttagttctgaaatcatgatttgcttatctttcttctcctgtaatgcgggtaactctgaatgttatatctcaaatgtcactagttgtgtgagacctctccctctagttggcttttcctccttttacactatttttgttcatatcatttttattatttattttttgagatggagtttgctatggttgcccaggctgaagtacagtagtagaatctccagtcactacaacctccacctcctgggttcaggagattttcctgcctcagcctcccatatagttgggattacaggcgcacaccaccacgcccagctaatttttgtatttttagtagaggtggggtttcaccatgttggtcaggctggtctctaactcctgacctcaagtgatctgccttcctcggcctcccaaagtgctagagttacctgcgtgagctgccatgcccagccatatttttaagtgcttatatcatattgcaactattggtttacgtcagcagttttcagtctgggaatgtgcactagaattacttgaacagctttataaaaatatttgtgcttggcaggccaagctaagaggattgcttgaggccgagagttcaagataagcctggttgatgtagcaagacctcatctcttagggaaaaaaaaaaaaaaaaaaaaaaaaaatttagcctggcatggtggcatgtgcctgtagtcccagatacttgagaggctgagactgccggagaccttgagtccaggagtttgcagttacagtgaactatgataatacaactgcacttcatcctagatgacagagtgagaccctatctcaaaaaaaaagaactatatacacacacacatacatacacacacacacacacacacacatatacacatacacaaacacacatgcttaggcctttcagcgattttgagccagcgattctgaggtagtgcctggcaatcattgaaagcttcataatgattctgatgcacaccgttggataagaactacctggtgtacatgtttgcttttgcatttaattaattaaaataatgaacatttttaatgccttttgagagtaaggcactgggctattataaaaagcattatcctcacaaggagctgtagcatactttcttatttattttggaatttctttttctttctttttcttttttttttttttgagacggagtctaactctgttgcccaggctggagtgcagtggtgtgttttcggctcactgcaacctccacctcccagattcaagtgattttcatgcttcagctacccgagtagctgggattgccagcctgcgccaccatgcccagctaatttttgtattttcagtagagacagggttctaccatgttggccagaccagtctcgaactcttggcctcaagtgatccacccatcatggcctcccaaagtgctggaattacagacgtgagccactgtgctcggcctattttggaatttctaactcctagaacacgacttagcactcagtaaactcttttttttttttttttttttgagtgagtgagggaatgatcagcattgtaaatgtgttggttttaatttccttttttttctaatatgaaatttatttatttttttgagacagagttttgctcttatcgcccaaactggagtgcagtggcgcaatctcagttcactgcagcctccgcctcccatgttcaagcgattctcctgccacagcctcccaagtagctgggattacagacgcccaccaccatgcccagctaactttttgtatttttagtagagatggggtttcaccatgttggccaggttggtctcaaactcctgacctcaggtgatccgcctgccttggcctcccaaagtgttgggattacagaagtgagtaaccgcgcctggcctactgtgcatttaaaaacttaaaaaaattaaaatataacattcaggctgggcacagtggctcatccctataatcccagcactttgggaggccgaggtgggtggatcacttgaggtcaggagttcaagaccagcctggccaacatggtgaaacctcatctctaccaaagatacaaaaaattagctgggcatggtgacacatgcctgtagtcccagctactcaggaggctgaggcaggggaatcacttgaatccggaaggcagaggttgcagtgagttgagattgggccactgtactccagcctgggtgacagagcaagactctatcttaacaacaacaacaaatgtatatatatgtgtgtgtgtatatatatacacacacatatatgtatatatctataacttaatgactttctaaattatatattttttaagacaaaaattcagaagaatgtactaaaataagtttattatacttaatatatcatcataaagtagacattaatttgctataattttcaagacttaacagggtttatcttgagcttttcatgtggttgaagataatattttattggaatgattatatgcataccaagtaaagtttagtaagtactccctgcatgactaaaattgagcacgcagcaaattatctagtgagagaccaggaatgagtctataaactattagtttatagataactttacttctttaagcctcaatttctttacctagaaaatattttctgttgttcaggataaaatgagatgacacatttgaaaagcacattgattccttaaggagtggctcctacttagtcctaagtacttacctgccatcatccatccttccataactaaatctgtaacttaatgactttctaattttggaagaatgaaatctgctaatttagatgtcttacttataaagcttataattacagagagagttgaagttttggttacatactggatatattagttgttcagtaaatgcttaatgaaatgaaattagttgagtctgtttcatctgttttatgtagagggatctcaacacacttttagaaattctgtaaaactataaatttttttaggtttttcttggcctggcataaaactctattttgattattactcattgcatgcctgtatcaaagtatttcatgtgctccataaatatatacacctactgtgtactcacaaaaattaaaacaaaacaataaaaccctgttttttgaaaccagttttattagttaagatacttgctcatttcagatattttattttattttattttattttattttattttattttattttattttgtttttgagatagagtcctgctctgtcacccaggctggagtgtagtggcaccatttcggctcactgccacctccgtgtcccgggttcaagtgattctcctgcctcagcctcctgagtagctgggattacaggctcccaccaccacacccagctaatttttgtatttttaggagagacggggtttcaccatgttggccagactggcctcaaactcctgacctcaggtgatccatttgccttggcctcccaaagtgctgggattacaggcttgagccactgcaccgggccccatttcaggtattttaataaatagtgctgaaaactatgttgtcactctagtttccatttatatacaaatgcatatattattgctgctgctaagcatggatgtttatttgagtactcactatcaatgattttcaaaccttgacctcaaacaaaatcctgccatttaggatataaaagatgggatgttttggtttaaaattctctgattcaagtagaggtttagggtgagggcctctccttcctggtcttctcttagccggctgcaatggcccctgagccatgtctgtggtagaaaggacagcactgaggtttagaatggttaaggaaaatgattaaggtcacacagcagagtcaggcttagtcagatctttgtgcttctacatctttccaatggcatcactgctgctactacagtggatacttgcaatgtaatacatatttttcattgtttattaaatgcagtaaattatgtttaactcctctaatatttcaatgtattttatcatctaactctttcaaatgatatttgaaaataataaaataatcttatttcttctagactcattttattagtgctgcactcaagactagtagttttcagcctgttagtatgccctcctccagagcagtggaaaagtattccgtaaaaccagaacaccctaatcttggtagctgtaatccatctttatataacacatttgcttccaaacaaggtaaaaatatgtagttctctatgaataaaaaatgtcagctgtgaattttctttgtgctacataagctgaaaacatatttcctgagcagtaggagtttttgttttataaaatttatttataggagtttttgttttataaaacaattttttttaaatgttctttttttaaaattgtgtttctcaggctaccttgtcttagataaaatgagttctttttttgcgtcaagtaatttttagtttattttgaaattttttaaattatggattatgttcttaactgattttaattaatctcataaattatcagaagcacttataaatttagaaaaaatttacttatttactacaaaaatgcttgtaaataaatcagttctcctgttctctgacaaactgcatatttgctctttcttgattctgtgagagcaactacctgagtacatttttaaaccatttctaaatattttcagaattagtaatgcaagtctgcttatcttgattgaattttaaaactctataataacaaaggaatacatggcttacttgttaaaactttagtatttaaaataaatgaataaatgtttttctaagttattgatatttgaataatgaactaaagaaaatcgagctactatccctttaatgatatacagatctatatagtacaatattttcagcacttgatttgttagaacagtgttgttttacagtcattaaagattgctcatgcttttaaggtgctttacattttgcaacaaatgagtggtccttacaaaactgttgtgcccagcactttgagaggccaaggtgagaggatcacttgagtccaggaattcgagaccaacctgggacatatagtgagatcctgtctctagaaataaaaataaaaaattatccaggtgtggtggcacatgcctatagtcccagttactttggaggctgaggtcggaggattgcctgagcccaggaggtagaagcttcagtgagctgtgatcatgcagctgtactccagcctgggtgacagagcaagaccctgtttcaaaaacaaaaaaacaaacaacaacaacaaagaactgttgtgaagtaatatgagtccatttttaagttatgaagagaggacagtgaagcacagaatggtgtgacttgcctgctcaaggttacctgacttgggagggaggatgtcagagctagggccagaactcagctttcagtatgacccagctgagtgccttctatagcagtggacacttttttcataactcaattccagagaatttcttgctgataattttgtttttcttaaacttgagttttcatgaaaaaggtgtctattttgttgattgtaaattgaatttttctttgtatatataaattacagtaacaaataaaagaaaataaagagtaaaaattcagtaaattaaacttttaatttttctatgctttttcttgggcaaatatcatgtttacatatttgtaattgtagcattttatacaacttttttactagcacataaaaagatttgccatattttatatagttgtcttcataattttaacttgtaatgactaaagggtggcctattgaataactattttacaatctacttgaccattatcctgtttcggatactcaggcagtttttaggttttcatcttcataaataatactgtaataaacatcatatttaaagcacattttctttcttttatgttatttccttagaataatttcataagagtaagattactaggttaaagtatataaaactttaattcttcctatacttattgccagatggtttatcagttttcactgccatgaaaagtatctgggcctgccagtttcaccgcagcttcagtagttctgaatattatcatatagattcgtatttactagatgtaagtgtacaatgtttgtagtcttcatttcttttgatttttaatggggtgaagttatttctctacacttaataatttgttcatcatttataattttgaatttatttttaaagtatagggaagagtaatatgctataatttttaaagctttttaaaagcaagttaagtttttaaaaaattttctgttaaagcacctttaaaagaagttgaagatacgagttttgataaacagaaatctcctttggagacaccagcacctcgcagatttgctcctgtacctgtttcaagggatgatgaactatcaaagagggaaaatcttttggaagaaaaagaaaatatggaagtgtcatgtcacagaggtaatagagacttttactagacctatcccaaattaggaaattgtcatgagattttctgtgcctagtagtaactgaagtgggatctctatttgtaatattttactttaaatgacccttgctgggaaaatcaagcttctttagattctttgtaaaagggtttggaggtatacatttataattattttatcttttacaggttattattacttaaacctttaatgaacaagttttgttaacttttttttttttttttttttctgagacggagtctcgctctgttgcccaggctggagtgcagtggtgcgatctcggctcactgcaagctccgcctcccgggttcaccccattctcctgcctcagcctccggattagctgggactatgggcgcccaccaccatacctggttaaattttttgtatttttagtaaaggcggggtttcaccgtgttagccaggatggtctcgataagttttgttaatttttatttattttttatgagacaaggtctcactctgtcacccagactggagtacaatggcgtgatcatggctcactgcagcctttatctcctcaggctcagttgatcttcccacttcagcctcctgagtagctgggactacaggtgcacgccaccacaccaggctaatttttgtatttttcatagagatggggtttcactatgtttcccaggctggtcacaaactcctgggctcaagcgatctgcccgcctcagcctcccaaagtgctgggattacagatgtgagccactgtgcctgggcaagttttgttattaataaataaaaaacaatgctttgctgaaggtaaggctgatcatttttagagcatgcttcctcatattgtttttaggtgtgaatttcaataataaaacgtagagaaacttaacattcatcaccatgttcacttggaaaaagtgctaatatatgaactttttttgagatgaagtctcgctctgtcacccgggctggagtgcagtggcaccatctcagctcactgcaacctccgcctcctaggttcaagcgattctcctgcctcagcctcccgagtagctgggactacaggcgcccgccaccacgcctggctaattttttgtatttttagtagagacggggtttcaccatgttagccaggatggtctcgatctcctgacctcgtgatccacccaccttgggctctcaaagtgctgtgattacaggcgtgagctactgcgcccggccatatatgaactttttaacacagagcaagaacttttataagggacatgtattaaccaaacatcatatgttctcactcataaatgggagctaagctatgataatgcaaagccataagaatgacacaatggactttggggacttgtggggaaagggtgggaagcgggtgagggataaaagactacaaattgggttcagtgtatactgcttggatgatgggtgcaccaaaatcgcacaaatcaccaataaagaacttattcatgtaaccaaataccacctgttccccaaaaatctatggaaataaaaaaaattaaaagaaaaatagtatattacagagtcttaaaatgtaccccttctaacaaaagtaagtgaaatattaaactaaacactttaattcttggaatcatttaaatgcatgcaggtcttatcttagacacatttaaagaattttaagaaagtcacaagataataaaatctttaataaagaaggcaacctcacaccaaaaattattatgtagtcttactacatacaaacaaggctaaaggatagatccacttattggtactttgaagaaatagataaatctcttctttactaatttataaaagtcgtctattttactggacttcgtgatgatgacacttatcaaattccttttttctgtgatggaaataaatgtaggggtttttctatgaattcaaccttttacttacttgtttatgtatttttttgtagagacagggtcttgctttgttgcccaggctggtctcaaactcctggcctcaaacagtcctgctgccttggcctcccagagtgctgggattgcaggcatgagccattgcgcctggttgtggtatagtttttatgaggtgtaaatatttagttttatttgatgagtgtatttatggcctaaattgtaggctactttgtaggctataagttttttttttttttgagatggagtttcactcttgtcgcccaggctggagtgcgatggtgtgattttggcttgttgcaacctccgtgtcccaggttcaagcaattctcctgcctcagcctcccaagcagctgagattacaggcacgcaccaccatacccagctaattttttctatttttagtagagacggggtttctccatgttggtcaggctggtctcaaacttccgacctcagatgatccacccacctcagcctcccaatgtgctgggattacaggcatgagccactgcgcctggcttttaggctataaattgagtagataatcatcataagaagctaacttaggccagaatacaaatatgtgagatattatatacaagagaaatgaattagtatttggaaaatgatactatatctcttctatttcaggaaatgtaagactattggaacaaattttgaataataatgattctttgacaagaaaaagtgaatcatcaaacaccacctcactaactaggtcaaaaataggatggactcctgagaaaacaaacaggtaaaaacaagagattggaatgaaaactagattgaaaagagttttgttcagatttttcaaatttctttgggacttttaataaattatagcattgcttcttaaatttatcttagatttagttactattttttgatgctaatatatcttccccctttctataatatagctatgaaatgaatatctcattttttcaaaatgcaggttattaatttctaacgtatggattattcatttctgattaaatgatatctaggatttgtttcaaaaataatccaagataggttagggtcatgtaagttgggagtatagataaaatgaggctagccaaaagttaatgattgttgtagttaaatattgggtgtatggggttcattttagtattttctctatttttgtgtatatttgaaattttacataataaaaagttttaaaaaaatcaaatctgggccatgataattatatttatcttcaacatcttaaagactacagtaataagaactagaggagccatatgttgagtaattttatgtggagatattgtatagtctatttacatgtaatgtaattactgataaggtaggatttgtgtctaccatgttgctttctatatgccttaggtcttagttcactgttcctcccttagtgccttcttttgtattagacattttctggttgcaccattttaattcttttgtcattttctctactattattttttgagttattttcttcgtggtcactccaggaattacaattaacatattaatttaaagcaatctaatttggattaatagtgatttaatttcaatattattcagaaactttgctccagtaaagccttgttccctccccttttcttctattattatcatacaaattacatctttatacattataagctcatctatgtagtctgataattattacttgatgcagctcttttaaatcagataggaaaagaaaagagatatgaacaaaaatacatatactggcttttatattcaactatatagttcatctttaacagtactctatttcttcatatggattcaagttagcccagtgtccttttattccaccctgaaggactcctgatagtatttcttatagggtaggtctgttagcagtgaattttctcagtttttgtttatctggtactgtcttaatttctttctcactttttcgttgtcatttaaacagacatttggtttctcatagttgtggaagctggaagttcaagatcaaggtgctggccgggttggtttcttttgaggcctttcttcttgacttgcaggtggcctccctcttgctgtctcttcacatggtcatccctctctgcacacacacccctggtgtcccctccttcacttttgaacaataattttgctacatacagaatttttggtagatgttctttttctttcagcattttgaatatgtcacctgactgccttttggactctgtggtttctgatgaggagttgtatgttggtgtgcttgatggtgtcccacaggtctctaagacttaatttttcttcatccatttttctttccccaattatcctcatattcctttcctcataatctcaattagcctgtcttaaagtttgttgattcttctgccaactcaaatatggtgctgagcccctctagtgaattatacatttcagttgttatatttttcaactgcagaatttctgtttgtcttttaaaaaaatgttttctatctctattgatcattctatatttggcaagacttcattcttatactttaattttaaaactggtttcttttagtaatagctgatttatagtctttgcctagtaagtctaatatctgggattcctcaacagcagtttcttttgactgtgcttttttctgtgtttgggctctactttccagtttctttgtatgtctcataaatttttgttgaaaactgggcattttaaataatacagtgtggcaactctggaaattagattctttcacctcccagagtttattgttgctagttattgttgttgttgctgtttgtttagtgactttcctggactaattctgtgaagtctgtattctttgtcatgtgctcccactgaagtctctgttttgttagcttagtctgccagtgattggaaagagatttccttaactgccttgaactgataagtctccctctctttgccatggattacgtgtgtgtgtgtgtgtgtgtgtatgtgtgtgtgcgagtgcatgcacatgcatgtgctagagcatgcctccagtgcctggcagattatgagtctgttttagcctttcacttcctacttgcacagagcctcaaggtcggaagtgagtgattaggaccttcccaggtctctcttgggcatgtacatagccctgtatgtggactagaaggcatgaccttctagattcctaggaatatgttggagcttttcaaaactccactttggacatttcattgcctagatttttaacatttgttgaccacaatcttgtttgccccaactagtgtcactacctcacgctgctgagatgttaaacaattgccaccgtttttttgaaaaatgccctggggatactttctcgctgagctagcagtgagtcagttcaaataaagacaaacactatgaatgagacttttaggagagcttgaaaccattctactgtctttagtggttgtgaggctgttggttttcgaggccgccacagagttgggaatagggtcccgagaatgaggcaagttaaaaaaattccataaagcttgctcttcttacctagagtcagccatttttcttgaataaatgctcctggggttcttgcaagtctttaatttccagaggttagaaaaacttgattttgatgatttttgctagggttctcattgtgcttatggagaagcagattttcagaatttcttactccaccaatctggaagtgcttctggatgttagcttcttgaaagcataaccttttcctgctccttttctgctacatctaaacttttctggttagataattttgtctcttgtgattttctgtgtttcatttgtttaatcacataactgattaattccatagttcaattttaataggataccatttagtaatatagctaagactgtatcaaagatttgtgtaatgaaatgtttactgaatttacaacaatttaggaaactttttcaaaaatcttctgtaacgttgaaactctaccttctcaaagatttccttcctgtgaagagctagaaacaactaaagtgactatgcagaagtctgatgatgttcttcatgaccttggccaaaaagagaaagaaacaaatagcatggtccaggtaaagtgggaatggtcttaaaattgatgattagttaagataaaaattaaaaaggaataaaagagttataaagatagaaattaggaggaaggatgaagaaaaagcactgaaaaagatatgtcagccacatctgttccatttataaagtatttccagaggccttcaccaagtgatttctacttatcgctccttgaccaggactgagccatatagccacctctggcttcccagcttctgttggaaagggaggaaggggaaaagagacctgtgagtgaatggacttcatttatccaatccacaatgtctgccatttcttccatacataaagagccaacttgcttatattttactttattttgctttcttcagcagagagagagagctattattggtcgctggactgcttagcactgctatggatttctcacctctattttatttaacactcacattagttttttttcttttctttttttgagtcagagtcttgctctgtcacccaggctggagtgcaagggtgcaatctcggcttactgcaacctccacctcccggttcaagcaattcttctacctcagcctcctgagcagctgggattacaagggtgtgccaccacacccggctaatttttgtatttttagtagagacagggtttcaccatgttggccaggctggtcttgaactcctgacctcaggtgatccacctgcctcggcctcccaaagtgttgggattacaggcgtgagccaccatgcctggcccacattagtatttctaaatggaggaaaaacactttgattgccaagtattcttttgtaagtcttcagtttgacaaattgagtccttagaatatattggtataatgtatggcctcaacaatagtgatagctgttattttgattaaaggaatcgttgtgagtttagtaactttctggtctttttttcttttaagccaaaagaatctctgagtatgttgaagcttccagatcttccacagaattctgttaagcttcaaacaaccaatacaacaagatctgtattgaaagatgctgagaagattttgagaggagtacaaaacaataaaaaagtacttgaagaaaacctggaagctattattcgtgcaaaagatggagctgccatgtattcgcttatcaatgctttatctaccaacaggtaagaggatgttggcatccagggttatttatgagtctgtcagttccactttcttcataatttttttctaagcactgtattttcctattagttttcatatttttaaaaggttctttattgactttgaagatgtggaacttataaagttggaatttggatatatatatatggtggtactacttttttctggtggaaatttttcttttaattttttctttctttggtacatatcttcttggatccacatgtgcttttcaaacatttatccttcaaatatttgatgaaaactaataccatgaaaacaaatagcaaaggtttttccttttcagatgaaggatattaggcccccattctactatcctaatatcctttccttttcagatgaaagatattaggatagcaggttcacaactagataagagttagatctgatccaagtcctgctcaggacagtaagtgctaatttaagaaaattcctttttctcttttatagagagatgtcagagaaaattaggatcagaaagacagtggatgaatggattaaaactatttctgcagaaattcaggtatgtcttggaaaaaaactgaaaattaagtgaattctcagaagataatattgattccaatttacaggcattacatttgttttcaaaatatttcttatataaaaatccacttatttttaatttaattgtcactctttatatttacttagtaataagtttagctttgtttaacaagtatattatctccacttatattctggctcttatttggcaaattgttggacaaaaactaaaacatgaataatctgaaagaaaatttagcaaaagtgtttggaaaaagaattatacttgcaaagatatttgaagacagtggatttaggagcattgacccgccaaagtaaaaataccagagtaatgcaaagagaaaaaaaccaacgagatttactaagtttacggaagtcagttccagatggaaaaacagcctctttctcacaaccacaatgggcatggtacatcttcaaatatccagcattggaaaagtctgggagttatctttcttagagggtccataatttaaaggaaatttaaaaattttatatatttgagtgagcggaactaggcaggctaaggtgttattttgtcctggggtgcaaggtgtgtttttttgactgtagatgtgcttatatgctacttacaagggtagcaaggtgaagcatcagtactgtttccatagcaataaacacagaaatatattttaaaactttgttgttgaagaatatatatttctaatgaagttatgaaaaatttattttaggtactatatggtacacacacacaaaaaaattgaactaagagtcagaagatttggagtctagttttcgctctacagctaactggcaatgtatcttactcttttgcaatgaatcccatgtaaagtatatttgtttaaactttcacataattttaatttatatttatctcagttttgttacaaaagtgtttgctttttttgaaatgtatttttaattttttaaactgttagcaaaattcatatggttcaaacatcaaaaagtataagaaggtttgtcatgcaaagttgtcctgctacccctgcaacccttctattatttcccattccccactccaaaagatactagtctttttagggttttgtttatttttccagagatttttgatttttatatatccaataaagccaatatcctttatttttaatgcatttaaaactgctaaactgtatttatatagcagcaaaaaataaattctaatactttctgatgtgaaagcattactatttgtagatattttaagtaattttaactttggttatgttaaggatgaactgtcaagaacagattatgaacaaaaaagatttgatcagaagaatcagagaaccaagaaaggtcagaatatgactaaagatattagaaccaacacacaagataaaactgtcaacaaatctgtaattccaagaaaacattctcaaaagcaaatagaagagcattttagaaatctacctatgaggggcatgcctgcttcaagtttacagaaagagagaaaggaagtaagatcctaatctgttcttttaacataattgttgtgttataattgatcatttcctttaagagataaataatgaagcgaatgtgaaggtgttttaaaaatatgaaggactatacaaatgtaagctatctttacactattgatacttagggttttggatttataatgtgaaaagcactgaacaaaatagatagttcctttcttatgagatctcacaccctggcatcatgattttgtagttatagcaggtataaaggtatatctagagatcatctagtccaaaaactagattctctagtttatggtactcaaaattttcatttgcgtgtgtgtatatagtttatttttcagtttaacaaatgcatgtttagtgcctagtatatgcaaggcgtggtactagatggtatggaggaaatttttttgactgctgtaactaggctataagtttctaagtgccaaacatggattgttgagcagatcagtaaagcatctaattcaatgcttatacttagtagattctcagtaaatgctccctttctgtgacatttagattatggttgaaggtgggttcagaaatatataaaattatttaaaggttaaggttgttgtatttttattgtactggagtataataaatatgtaaaatgtgtttaaatgtttcttgttggtgctgaaaatatacttagtaatgtaaaaattttcatgtttcttaggtggatgatttttatatttaaagcttttcaaactaatgcttgaaacctgttatctagaatttaagggctgttgaaaacagaggttattttttacttaatcattcttgttataatacttaagctagcaaaaggaggctttagaaaaatgagataagtgtttgatgactgttttcatggtgagttgaataactttgtacacacaggggcttttgaaagcaaccacagtaatacaagatgaagattatatgttacaagtctatggaaagccagtttatcagggccatcgaagcactcttaaaaaaggaccatatctcagatttaattctccatctcctaagtccagaccacagagaccaaaagtaatagaacgagttaaaggtaaggaatctcatttttaatgtttaatctcatttcttaatagtatcagtttaatatgtaaagtttctttttgctttttatttattgcttatacgtgccattcaaattatatgatgcttggggatggaaaaataattcctcttaggagaggtaggaagaaatagaccaacattttaaaaaagacacaagataggaataattgggaagaaatgtaggattaaatggcatcttcagataaagcatcataaaatttttatttaggagaaaatgattttttttttaattttttttttagacaaggtctcaccctatcccccaggctggaatgcagtggcacaatcatggttcactgcagcctcgacctactgggctcaagcgatcctcccctctcagcctcccaagtagctgggatgacaggtgcacactaccacgcctggctaatttttttgtatgttttatagagacagggtttcaccacattgcccacagtgggtgatgatgaatcttgagcatctaaattataatctaggaaagtagacatttccctgaagacctaggtgcattatgaacagaaagatcagccatttgctgtttattataaaagtgttgatgagcacttttgcagtttggttttcaaagagacttaggtagaaaggtgaaaacttttttgttgcttttgtgcacaactgaaaacatcttcatgtatcactgtgtattttgagtcacatctactgtttcactggtactgtgtatttaaatacaacttttggttatatactgagtctgttgactttggttatgtattatagtttctcagcttctgcttagcaatcagtaagctacagctgacaatatgtgataactagtagatacaaacccattttcctctcttatcctttctagaagttggagctatggtggttactttggttccctttgctttctaaaggttatgcaatcatatacagtgtcaggttatatagaaattttactaatttaaaatagaaagcatatagcttatgggtgatatttatcctaatggatggtatttaccctgaagttttctcttatttagtgtagttttgctttttttttttttttttgagacggagtcttgctctgtcatccaggctggagtgcagtggcacagtcttggctcactgcaacctccacctcccgggttcaaacgattctcctgcctcagcctcccgagtagctgggattacaggcatgcgccacaatgcccagctaattttttttttgtatttttagtagagacagggttttgccacattggccaggctcgtcttgaactcctgacctcaggtgatccacccgcctcagcctcccagagagctgggattacaggcgtgagccactgtgcccggcctagtgtagctttgctattaatttatatggggggttttgaaagtctttgcaaaaaataatttgaggctttaaaatgctttcaaatccaaaaataactttattcaataatgcttttaatgatcagaagtgattaagagcctgtattagttcattttcacactgctataaaaaactacctgagactgagtaatctataaagacaagaaggtgtaattgactcacagctccacatctctggggaggcctcagaaaacttagagtcatggcgaagggaagcaaggcatgtcttatatggcagcaggagagagggagcaaagaaagccatgcccttttaaagcatcagatctcatgagaactcattcactatcacaagaacaaattaggggaaactgcccccatgatccagtcatctcccaccaggtctctcccgtgacgcatggggatcaatttgagatgagatttgggtagggacacagagccaagccatatcagaacctaaggacttatgcttatcctagggcctcagtacctgccacttcctctgtctggagagctcttcgttcagacacttgcatggttctctctcaattcttccgtctccgctcttagatgatagctccttagagtgctctaccctgaccattctattcaaagaattatctcctgttcctctacatctcctcactctgccatattgttcttcatggcacttcacatttcctgtgttatatttttatttgtttgttttattatttatttgtcactactggactgtaagctccatgagtacagttggtttagtcacctctgtattccttgtgccagaaacaatgtttaacacatattaaatgctgaacaaacattttaaataaacacttaagaaaaatattcattcaatagaatgactatcagagaacaagatgaaagaatatagacatggtattacaatttttcttcctggggtcataaacaaaaagaaactatatttaaaagtctggatgtgtaggttgggcacagtggctcatgcctgtaatcccagcactttgggaggctgaggcaagaggattgcttgagaccagcctcagcaacatagctagatcctgtctctacaataaattaaaaaaattagcagggcatgcctgtagtcccagctacttgggaggctgaggtgggaggatcacttcagcacttgagcttaggaattcaaggttgcagtgagctatgatagtgccactgcactccagcctgggtaactgagcaagaccctgtctctaaaaaaaaaaaaaattagatacattaaaaaattagatacatagaaacacccacatgtgaagtggaagtgtaggtgacggtctgagacatcaccaccaacctgggcactggggagatggccaagactgaccccaagaccttgcaggacctcacctcggtggtgtagacacccctgcagcagatgcaagataaatttcagactatgaccagataattgggagaattgatgatatgagtagtcacattgatgatctggagaagaacatcacagaccccatgacacaggctgggctggaagaactggaaggtgaaaacaagatacctgccacacaaaagagttgagggttgctaataatttatataatggaatctggaacatcatttttctgagccaagagaagactgaatggcttttttcagctaactactgtgtgtagacaggttttatattataaagtgtgcattcttatcacatactatatagttagtttataaagcagtttatcccccagtttcttgaatgtggtatcttcacatcttggaccttggtcagttgtactattaattattaaaaactaaaactttggcagttcctgcatttaaaaaaaaaaagcacccacatgttaaaagtaaaaatgtaatgtcaggaaattattaagaaaatattttagcctcttcctttgcccgcttactttattctttacttttttgtgtgtgtgttccatagacatttattcacttctccaaagagacataaaatcaaatttttaatattttaagatttaggatataatggctatatgtgtatgtatacatcataggaacagaaaaaaatgtacagcagtccccccttattcatgggggatgtgtcccaataccctcaatggatgcctgaaactgtggatagtaccaagccctaacatgtactatgttcttttaatctgataactgagatggtaactaagttattaatgggcaggtagtgtctacagtgtagagaccccagacaaagggatgattcatgtcctgggcaggatggagcaggacggcatgagattttatcgcgctactcagaacagcgtacattgtaaaacttatgacagccgggcatggtggcatgcgtctgtggtcttggctactcgggaggctagggtgggaggatcacttgagcctgggaggcagaggttgcattgagctaagatcgcaccactgcactccagcctgggtagagtgagactccatctaaaaaaaattaatgaataatttttaaatacttatgaattgtttatttctcaaactttccattaatattttccagccaaggttgatcctgggtaattgagacagggaaagagaaaccacagataaggagagactactgtataatgatattaattagtaaggtttaagtaagtatagaatttgattgtctgtacataatttaaaaagataaagctggttattcagaattatgttgtgtgtaaaggtgtaatgagaaaatgaaaatcatcaattccaaaaatgatcattaactttttcgtacctatggaaaaaaatttaaagaattcaaacattgttggaatattcttcagaatctttatttaacatttttttctagttattatatctattttgtcacagtagctgtacaagttgtatgtctattcaggggctggcaactgtggcctacacgtgagctgcctgtttttataaagtttcatttgcctctaactgtgttcattcatgtatatattgtccatggcttctttcatgacacaacagcagaactgagtcattacagctgagatcacgtggcctgccagacaaatatttactgtctggccatttaagaagtttgctacctctggtctatatattacttctgttttggggccttgtaaccttatatagaattaagatttttctgtgaagagctgttgtatttctagatgtctggatagtagatattctaacaatattttaaaatatctgccattggtgattattataggcactaaggtaaagtcaataagaacacagactgacttctatgcaacaaaacctaagaagatggattctaaaatgaaacattctgttcctgtgttacctcatggcgatcagcaatatttgttcagcccaagtagagaaatgcctactttttcaggtacattggaaggtcatctgattcctatggcaattcttttaggtaagaatcaacaaaatatgtggggtggattttattttatttatttatttgtttgtttgtgtgtttattagagacggggtttcactgtgtggctcagagtggtctggaactcctggactcaagcagtccacccacctcaacctctcaaagtgctgggattacaggcgtgaggcaccgtgcccagccattgaattttaaattcttatcagcagtagcagaacttacaaaatggtactaacatgatagtcatctaccttttcttgtaaatgttatttgtttttgtggggaaggcctcacaatgtattttatgctgtgtaatagcaatctctgaaatgatgggttcctgctgtagtttcaccaataggaaaaattcttttggtatgttatattattgtagatgaaatgaaattttaaacaatattttggctgggcacagtggctcatgcctttaatcacagtactttgggaagccgagatgggaggattgcttgagaccaagagtttgagaccagcctgggcaacatagcaagaccttgtctcaaaaaaaaaaattagctgggcttgatggctaacacctgtagtcctagctactctggaggctgaagcaggagaatcccttcagtccaggagtttgaggctgcagtgagcaatgattatgccactgtactccagcctggacaacacagcaagaccctgtctcttaaaaaagaaagtttaaatatgtcatggacattcataataattcaataagtttgattatcttgttaatatcattatgtctttggggaagtattaaggtacttttttttgtacttttgaactaggctatcataagtgaaagctgtgtgggtgtgtaatctaagccaatagttgtttatttacttatttgccttctctctgagtcttcatgttaaaaattgaacagatcatttttgtcctcacaccagctgttcaagtctaattagctcttttttccctttagtgtcattgctgttcttttgttttgattaacaatttaagtatgaatattttttaatgtaagagacttttttatttttgatattatgggttaatttcatgtcaacataatagctctctgtttaaacatatctcctagtaataaaatagctcacacttttaaagttcttactgtgtgcccggtacagttctgagcactttacatatattctctcatttaatccaccctataaagcacatggtaatatacaaattgtatagctaagaaaactgaagcacaaaagggttacataatttgtcaaaggctacacagctagaatggtgccaggattcaaacccaggcagaggcagtctggctttatagtctgtgttttcaacaagtacactgtactacccctctttactttgatatgtagaagtcaagtgggactttggaagtgaaagtttttgacattttaaaatgtggatagtattaatagctttctattagcctttattttgaggtttaaattagatagtgatgtgaagcgttgagtacatataagtgcttaataaaagtcactgggtatggtgagtatgtcgacagtgctgatgatggagggaggggtgattgtcagatagggcttttttaaatatgagaatataaccattaagatccagatggtatattagacttttccctttttttctgaactagttgacttattttttctcctaaacttcttaggacaaacccaaagtaatagtgataccatgccacctgctggagtgattgtcagcaagccacaccctgtaactgtgactacttctattcctccatcatctcgaaaagtagaaactggagtaaagaaacctaacatagccattgtagaaatgaagtcagaaaaaaaggatcctcctcagcttactgtgcaggtatgccagggtgcatgagtagaaaattttaaggaagaaaaaatttttttgcttaacgttagtacggaaatccattatattgcttcataaaaatattgcttttgatcatgactcttttttttaaatttatttttattttttagacagagttttgctcttgtcgcccagtctggagggcaatggcgcaatctcggctcactgcaacctctgcctcttgggttcaagtgattctcctgcctcagcctcctgagtagctgggattacaggcgcccgccaccatgcccagctaattttttgtatttttttttagtagagatggggtttcatatgttggccaggcttatctcaaactcctgacctcaggtgaatccacctgcattggcctcccaaagtgctgggattacaggcatgagccaccatgccccgctggctctgttatttttaaaactgtgatattaatatgatgtttctgtcctgttttgcatgatttaagctgctcttctaggccaatgacttatatacaagtggcttggtgatattccaaggggaacaattgaactgtgtattataattaattttaaaaagttaatatatgtgacttatataattaatacttcagactttacactaacatatgttagaagacttgaatgaatacaagacttcaacaggctcatgtgggaagaaaccctttgacatttcacaaacatctacccttcggcctgggatccagctgtagaagctgaggtcttcactaggtctggacaaaggtgaacatgagtatttacatgcgactttctattgaccagtcaggaggcaactgtaggaaagcattcatgaactgtggtaaactttttggctgatttactccaactcctgtattcgtcttaccatccttgcttacttacaaataattagaacactccagtccttagactgctccaaggttcctcttttgattgagccaggacaaatgagttttcttgggcaacttagtatgccctctgggaagagagaagacttgcctcattcttggatcctgatcactgaggagaagataatcctggagctgtcggatgccaccacatgaacagtcaacaggctcttagtactgatttttgactggacactcctccctgaacaaacgaactatccatttcttctgcacaaatttatacagaacagcctcaacccaccagcctgagagattcccagggacttagaaatcacccatgtagctccacaaacacttcgttctcatagattgacttccaccctgcagctaaaattgatagtgtgttttcacagccaagttgttagggctgaggcagtcaatggatctcaggaatattcccggccctgtgcttgataggagcaaatgcacaataaagccctggctgcagaatctttcaacttccagtcattcttgcagggcagggaactcccaacatgaacccaagtgtgttcctctcttatagcagtctttgggcatccttctgacagcgtaggcccactaacccagtggtgcagcagctatggaggcttcgggagacctggggacacttcagcctggacagctccctgagccaagtacaaacccggtcaatgtgtattgaacgaatgagcatcactagcacagtcagtccatggaggaaattagaggatctagatcagggggcaaagaatcctgaattaaaaggcaaacaacacacagtaagaacatatgaaacgaagatgctagtaaagcattaatttttaaatataaagatctctataaattaataagaaaacacagatccaagtctagaaatgttcaaaggacatgaataagactctacaaaagaggaagtacagtttatcagcaagcaaactaaataagttttgccagtaaccaagataatgcaaattgaaataacaataagatgcatccatttaaaaactattattgctgaaacaatcatattatctaattttggtgagggttgggtaaaacttagacttaattatgtttttgatgatgtaaatagaggttgttaggattacatttcaccagtacttccaagaatcttaagtattcgtgtcctgtggcccagaaagttaatccaatatctggctatctagtatagtgaattaatttagggtttaggaagaaaatgtgtgtgtgtgtgtgtgtttatgtgtgtgtaagttttttttgtagtgatatatatataatagtggaaaaattggaaatttcctaaatttttccaattgaaacataattaaataattaagacatgtttgttgaaatgttatatagtcatttaaaaatataattatgaagtctatacaaaagcatgataagtgtttatggttcttgtaatcaaaatgaaaaatcaagaatgaaaactattttaaattttagttatgtataagtagatagtaaaagacaaagggaatagtgaaaatgaagtcatcttaagatagaattttgtgtgttttcctctttatttttcatattttataaaatatgctttcataattaaaaaattttgttatccattgggttcacaataaaaacttaaagggcatgctttgtttttatgtatatgtgtatacacacacacatatacatgtatatacacatactcataaaaatatttgagtaaaaatgataaacagaaagctgaatgttgtattctgttttaggtattacccagtgtagatattgacagcatttcaaatagtagtgctgatgtcctttcacctctgtctagccccaaagaagcatctcctcctcctgtgcaaacttggataaaggtatatttcagaattttatcatattattttgagtaatgtctgactgtagattttaactaattactccatttaaagccttttatcataatgataacttataataatttagattttgaagaaaagattgaaaacaattttttttttttcagtcagagtcttgctctgtcgcccaggctggagtgcagtggtgtgatctcagctcactgcaacctccgcctcccgggttcaaccagttctcctgcctcagcctcctgagtagctgggattacaggtgcctgccaccacgcccggctaatttttgtatttttagtagagatggggtttcaccatgctggccaggctgatcttgaactcctgactccaagtgatccctctacctcagcctcccaagttcgggaattacaggcatgagccaccacgccagcccaaaacaaattttgaattgtttatgaacttgaaagtttgtttcagatccttacatttataactatttggaaagtgataatctttagtgtaactttttggtaatttaagttgtgaaactctcatgtgaagaaagaatttctgtcactttggtgatgaatctttgatttacatgggaattatagatatcctaaatgaattttatagtgacagttgggagtttatattttggaatgttaccttgttatcccactgttgacatgatacaaaaatatgcatttcttcctggcatttatttgcttttgaataatgaagttatggctttactacacagcaaaatagcactgtaacttaccccaggttttgtttattgtaagcaaacttggccaagggtacagttttaaaaggagagagaataccagcaatctttcatgatcataagtaatgaaatagaactgtccgtaagtgacatttgtgcttaattgaattttttcatcagtatttttttttaaccttctgtttattgaaacttctgtgataacaagcaataaatttttggactgtttatcattctgctgtcagtaagaggctattgcatgactacattttatataatgaggcctaatgattagatttgtaaaatgactattttgttttttttcctgaattatttgattctgtatccatcttcgtgtgagttcatatatgtttatacttagagatctacacatgtaaacactttcctttatcttaattctggaagagaagtctcaattatatcaacctgttgatcaattaagtgatattgctgatggagtcctttacagaaaaacagctgattaattttttaaagctattgaaatgttgacctaatggcttggggactagcttggatttcatttactaattaaatcaattctgaatagggtattaaaatgattaaaaaggaccatgtaattataagcttatactataggtggaaatatgataaattacttataaattttaaaagtgttaagcacaacaaaaactttctgaaaatgctttcttagactccagaaattatgaaggtagatgaagaagaggtgaagtttccaggaactaactttgatgaaataatcgatgtcatacaggtaacaaagcttagaaaccatgagaaattatttttctaccggtatttttccaggttgttgactatctttggactatcaatattatgttacagtgctttgagatactttcttttacttttgagttaaatatacttttaaaaattataaagttgttattctagaatgtctttaatctatatcacctatctgccttcatgaagcttcatgattatctgccgttccccacctagattttgtctatctgtttcctgctttcttctttctttccacttcctttggcttcttttcctccaatttgtctttttttctttctgttaattttggtttttggattcatggtgaggtgactagttaattgatattgagaaaaaagttgtgagaaatctataatccaaaggaatatcccatatggaaggaagagttatagaaatgatagaaataatgaaatagagggaaaaataggtggaagtaaattataaaggatgggacaaaagatcatagaacattgaaactacttgaccattatgtcattagactttaaagaacacatttgatcatgtttctttgacttttagagctaagatcagttttgttaatcataaaatgaaatccaattttagaatatacagaggtgtgcagtatattaatgttattcgctcacagatatgtcttttctcatgtgagtgccacatgagaattttgaagacagggaccttatttatttttatattcctaatgcctagcaaaggtacttggtaattgtttatgcaatatacaagcgaaagaaatggttatagaagtagcagagaatttagcattcaaagacaagtgttcctgtattagctctgccatttataagctgtggacttcatttttcaatggaataatattactgagttgtactatttagagagacccaaagtgtttttgattgaattatttatagataaaatgatgtgatatctgtgatttgcttcaaaatgatatgtgaaggggaaagtggctagatgagacaagattgaccataagttgataattgttaaagctggggagcggataaatgcaattcatgttatttatgtaacagatacagtacaaggacactatttgtttacttttaaacacatatgatttttttgtaataaaaattttaacaattccagaaataactctattggttatgatgtggtaatgcaaataatttgtaagatgactgaccttattgcatatttaaatgtaaattataagttgtataagagcaaaaagtgattttggaagtgtattagtgtattttgcattgttataaaggaattactgggtaatttataaagaaaagagatttaaggccaggtacagtggctcatgcctgtaatcccagcactttgggaggctgaggcaggtggattacctgaggtcaggagttcaggaccagcctggccaagatggtgaaaccccatctctatcaaaaatacaaaaattagctaggcatagtggtgggcgcctgtaatgccagcatcttgggaggctgagacaggagaattgcttgaacccaggaggtggaggttgcagtgagctgagatcgcaccattggactccagcctgggtgacaagagtgaaactctgtcttaaagaaaaaaaaaaagtaaagagatttaattggctcgtggctctgcaggctgtacaagaagcatggtgccagcaactacttctggtcaggacctcaggaagttttactcagatagaaggctgtgagggtccagatgtgtcacaaagcaagggagggagcaagagagagaggaggatgtgccagtctcctttaaacaatcagctctcatatgaactaacttattaccatggggagggcaccaagccattcatgagggatctgcccccaagacccaagcaccgcccaccaggccccatctccaacactggggatcacacttcaacatgagatttggaggggacaaatatccaaaccatatcaggaagcatcaattttttaacgataattattaagcatacatttctagagagaaataatagtgttttatgtaggaataattatgttttctagtttattttgtgattgcataaaatgaatattgggttctaaaaagacaaactgattgtgtaattaagggttcctcaatatgatatgtctgactaatgtgtatattataattaatgtgataccacctaattagaaatgctgttggttaatttagaagggtttcttaattcacctagttccttgcctatagttggtactcagtaaatgttgaacaaatacatgaatataatagttttgtttttgttactaccaggaagaagaaaaatgtgatgaaattccagactctgaaccaattctggagtttaacagaagtgttaaagctgattctacaaaatataatggtcctccatttccgccagttgcttctacttttcagcccactgctgatattctggataaagtaattgagagaaaagaaacactggaaaatagcttaattcaatggtaagtttataatgtttttggtatgaatagaaccatagtagaaaatataaatggaaagtattaaaatgtggctgaaaatattccttgtcttcttttgtttattaaactttctttgctttagtcactggaaagtgtttgatataatgctgagggcttaactattgttggaggttattgtttttgtccttgaatatttgtactcaatctgtctactctggcacaagtagactattaggaagccttaaaaatgtacgtgttctttaatccagtgattcatttccagaaacttatcctaaagaagtaattatggtttgctgctaggccagggccacgaaccagtaccagtctgtggcctgttaggaaccagggaactaagctgcacagcaggaggtgagcagcgggtgagtgagcattactgcctgagctccacctcctgtcagatcagctgtggcattagatttcatagaagcacaaaccctattgtaaactgtgcatgtgagggatctaggttgcacgctccctatgagaatctaatgcctgatgatctgaggtgaaacagtttcctcccgaatctatccccccaccccctaccccaccacccctgccctggtctgtggaaaaattgtctaccacaaaaccaatccctgatgccaaaaaggttgggactgctatactaggccatataatacctagcactacaaagagggcactgttctaggtttgttacatactgataacaacaagctgtaatatgttattattgttacatattacaataacaattgtaacttgttacatatgaatatgaaatgaacgctattatttgtatttttacttgtaagaaaccttaaggaagttatggaataagtgaaatggctgaatattaatatagtcatgaaaattaggtttagaagaaatttaatgatataaaaagatattaataatgtactggcatataaacaaagcaggatactaacaatgtaaccccagtttacaagatcttactcaaaagtaagtaggcagctagcacagtggctcatgcctgtaatcccagcactttgagaggccaaggtgagtggatcacctgaggtcaggagttcgagaccagcctgaccaacatgatgaaaccccgtcactactgaaaaaatacaaaaattaggtgcgatggtgcacacctgtggtccctgccactcgggagactgagacaggagaatcgcttgaacctgggaggtggatgttgcagtgagctgagactgtgccactgcactccagactgggcgaaagagtgagattctgtctcaaaacaaaacaaaacaaaaaactgtgcataaaacaaaagtttgaaaaagcatacataccaaattaactgtgtttattgctgaacctaggattataggtgagctttatcaattttttaaactcttacatttttttctaaattttctacaatgaacacctattatttatataataatttttaagaagtctattaactgcactaaagaaatgttctagaagtctcctgttcccctttcccttcctgaagatgactttggaaataaattttttctttacattttaagaggaaaactacctataatacagcctatatgtgtattaccgtgaagaaagggcagctggacatcttttctagctctgatctgatatggtttttatgtgtgcactcagagtggaaatcaaacagtttaggtacatgatatgccagatagtcattggcccaagtcttattttgagtttaggagttcttttaagcttttcattagactaatctgaaagattttaatttgatttcataaactatctcccacaaggagattctgtttagcatgttttatcttcttcagaggtactttttttttttttttttttgagacagggtctcactctattgcctaggctgtagtgcagtggtgtgatcacagctcactgcagcctcaacctcgtgggctcaagccatcctcccacctcagcctcttgagtagctgggactacaggcacgtaccacctaatttttgtattttttgtagagacagtgttttgccctgtttgccagaatggtcttgaactcctgagctcaagcaatctgcccaacgtggcctcccaaagtgttgagattacagatgcaccatgatgcccagcccattttattttttttcttctagatttaactttcagaatgactgctttcacaccaacatgtttgtggcattggtaaaggttatttttaggggtggtatgtctaacattttttacatttcaatcaaattgaggaatcttaacttttatctgccccaccatcctctcagggtagagcaagaaataatgtcaagaattatctctgggctctttccagtccagcaacagattgcacctagtatcagtgtttcagtcagtgagacaagtgaaccactgacttctgacattggtaagtgaaatagaatttttttttgtttttattaaaagacaaaagctttagttcatcgtggatttatatattccagaggtcaagtaaattctccagtaacaaaaggtaagctcttctaaccttacttcttagtacttctttggtgatggttagttctctctcaccctcttatttcatattgcagctttcagattattaaaccactcttcatacctcccaccccaaatctctttgttatccccatagtactttgtacatatttttgttatagtaattatcagattatattaaggttggtttccatatgtacctcactctttatactataaattactcaggatttaaggatgtttctccttttgtgcctagtccttgcctgatacccaacaagagtttaagtattcattgaatggttaaaatgagcctctttcttcatggagcctatgccattcttttctccatttttttcttttcttcctttctttatggtgcctatgcccttctcttctccatttttttcttttcttcctcttctttttctccttcccccttttccttttcttctcctgcttctcttcccgattttttcttttcttcctcttctttttctcttttcccctttcgctcttctccccattctcttccccattttttccttctcttcctcttcctcctgtttttcttcctttccacctcctccttgtttttttgaggtaagtttacttgccataaaagtcaccacttctaagtgtacagtttgacaagttttttgtttgtttgttttaattagagccagggtctccctctgtcatctaggctagaggctggactgcagcgacatgatcataactcactgtaacctctaactcccgggctcaagcaactctcctgccttagcctcccaagtagttaggaccataggtgtgcaccaccatgcccagctaaaaatcattttgggtccaggcacacagtggctcacgcctgtaatcgcagcactttgggaggccaaggagggcagatcacctgaggtgaggagtttgagatcgtcctggccaacatagtgaaaccccgtctctatgaaaaatataaaaattagctgggtatggtgacacacacttgtaattgcagctactccggaggctgagacaggagaattgcttgaacccaggaggcggaggttgcagtgagccaaggtcacgtcactgcactccagcctgggcaatagagcgagactctgtttcaatcagtcaatcaatcagtcaatcaatttggtagagatggggtcttgctatattgcccaggctaatctcaaactcctggcctcaagtgatcctcctccctcagcctcccaaagcactgggattacaggagtgagtcaccgcacctggcccagtttgacaagttcacacagctatatattagccacataatcatgagatagaaaaacatttctgtcttctccaaaagcttccttatgccattttgcagtcaattcctaaacctcactcgtgcccactggcccctaacaacactgatctgctttctattactgtatttttaccttttctagaatttcatacatatgtaatcatgcaatatgtagcccgttgttggctggcttcttttattagcataatattttgacaatcatgctattgcatgtagtaatagtataatgtatagatataccataatttgtcaatccatttaccagttgatggacattcatagtctttcagtttttggctattatgaataaagctgctatgaacatttgtaagcaaatctttgtgtagaaaccttttaattttggttggtcatatgataagtaaatgtttaactttataagaaactgctaaacatttccaaaagtgggtgtactattttgcattccacccagcagtgtatgtgactttagttgctccacatcctccccaacacttggtgttgtcagtgtttataattctagccatttccgaacatatgtggaggtatttccctaactatactaatacctgagtagtataattattaatgatgtacaactttttaatgtgtttatttgccatctgtatatttactttggtgaaatctctttaaatcatttgaccatttttaagttcgagtcgtgtcttcatattactgagtatgaagttttttatctattctggatacaagtcctttattggatatatgttttgtaaatattttcttctactttgtgttttgcctttttgttttctcagcattattttttgaagacaaaaagattgattttgaagaagtctaatttatcaggttttttctagtagtttgtagggatttttgcatgctgcttttaaaaaaatctttgctaacccaagatcattaagatagtttcctatgttttcttctagaagatgtatggttttagattacacatttaggcctatagtatattttgagttaagttttatggtgtgaagtaaggatcaagttcttttttgtttggggttttttggcatatggatatccagctgttctaataccatttgttgaaaagattatcattattccattgaactaccttaacaccttggttgaaaatcaattggttatatatgtgtgcatcttgtttttggactttgtatcctgtctcattcacctgtaagttatactaataccatacttcttgattactgtaatttaatagtaacacttgaaattggatagtgaaagtttttctaactttgttctttttttcttttttattcctgtttatcattatctctactttttttcttctttccagcctcaggataagctattctttctccctcatagactatcctttaacagcccgaatcctagacttcagagtctatattcaccactttaatttctcattacctacttcctctttggtccttataggttggccttcttttgccctccccctcaagaaactcctttctcacagcatttgcttgtcaaaaatgcttccctttttcaaatccttgttttactgtatggctcaagcataggcactattgaccatctctgatgcttaaactcttctcctggtgttggctgcttagacttcattctgttaattcttcctcttttaaaaaaaaaaaaaaaacttctttaagaccttcattttctcattttattttctgctacttgaataaaattatttccctagttcccatgctttgccctcttttctgttttcttccagtttcctcctgacattagttatcctgtgtcagttgatgaaccctaagccatgtatttgggccgacaacttgcagttctgctggttgatgaatattgtgcttgatgctcccctggcatctcatctttagtatgtctaaaatgcttctcatttttgagatcacagttctcccagcacccaatctctaaagccttggagttattatttgttctattttctttgctttgctcttcttcattccccactcagccataccctatatcccagcttcatagagtttattgttgcatttggctaatttgtcctatttagcatagctcacatgcctccttctgttgttactatcccagttttctctcgtcatctcatctttgaagggaggacaaaaataaacaacaaatttatgagaaaatttttttcctggtgaaaatctgacattttacaaattgggtatttagatcctgttttcttccctgtcaaagatttgtgtttgcttttgttttgccagtgtctgggtagggatttgggaccttataaaaacgatgttctgattttgggccatgctcaaagaatgaattatggaaactaaaaaggagatgtatcaacatatattgttgaatatgaatttgggattgggatagtctctgctatggtaactcaagagcaaattgctgttacttaccccgtcaacaagtgatcccactagacgtctacccactttttagggaattctggatattgttactatagttgtgttacttaagcagtactctttggtgaggtcacatctccatcaggttgtacaaatgagtatccacttattttccgcatggagctttataaatatcactactttaagtcaagtaaagtctctccaggagattttacttaatttgatgtacattcatgtaagtgagaagtacaacccattcagatattaatatacctataggacatctgataacaagcacctcaactgcagtagatgttaataactgatgtatctgaaactagaaggaagggaggtttgcctttatatttagtgcattcttttgttgtagtcaagatctatcacagagtttcctgttgttatactcttggaaatgtgagttgtattcagatgagggcatttaatgtgcccatttttatcactaaattctgtagtagtagagaagaggccatctgagtaaattttcatctcccttttttttatttacagagaatatttgttatgtaagttgtcctcttagtctttttcataataagtagatacatttgtattttcatttttattcctctttccaccctcccccacccacccccatacacgtatattggcatctctaaactttgttttgttttgttttgtttttgacagagtctcactctgttgcccaggctggagtgcagtggtgcgatctcagctcactgcaagctccacctcctgggttcacgccatcctcctgcctcagcctcccgagtagctgggactacaggcgcctgccaccacacctggctaatttttatatttttagtagagacggggtttcaccatgttagccaggatggtctcaatctcctgacctcatgatccaccagccttggcctcccaaagtgctgggattacaggcgtgagccaccgtgcccggccggcatctctgaacttttaagaatgaaagttcggcccaggcgcagtggctgtcgcccgtaataccagcactttgggaggctgaggcaggtgtatcacctgatgtcaggagttcaagaccagcctggccaacatggtgaaaccccatctctactaaaaatacaaaaattagccaggcatggtgacgcgtgcctgtagtcccagctattcaggaggctaaggcaggagaatcgcttgaatctgggaggtggcagttgcagtgagccaagatcacatcattgcactccagcctgggtgacagagtgacactacgtctcaagaaaaataataataataataatgaaagtttgaattgcaagcatgtttcttgcccacttattctgattttttttttttacttttagtggaaggaacaagcagtggcgccctccagctttttgttgatgctggtgttcctgtgaactcaaatgtgattaaacattttgttaacgaagctcttgctgagaccattgctgtcatgctgggtgacagagaagcaaagaagcaaggtcctgttgctacaggtgtttctggggatgcttcaacaaatgaaacatatttgccggtatggggaatttttgagacatttattgaagaatagtaaaatagatgaattttaagctgcataccataagatcattgtttgtggtagaagtattattatcatttttagagacatggtctttatttattgccctggctggtcttgaagttctgggcttaagtgatcctcctgcctcagcctcctgagtagctgggattacaggcaccagccaccatgcccagcttgtggtagaattttattccttgttgctatgattaaagtaacgtttcccccagcattttattttaaaaacttaaatctatagaatagttgaaagtgtgataaaatgaacatctgtacaccctttacctatacagttgtccattggtgtacgtggagaattggccaatccttgcatactcgactctcacagttggccctgtaaaaccaaagaatatgaaaagtcagccctctatatatatggatttcttatctcatgaatactgttcttgatccacatttggttgaaaaaaccaaatttgtatgattggcctcttgcagttcaaacctatgtttttatttagttatttattcaagggtcattcatatttattgattgataatattttggcacatttataaaaatctgtctttatatctgctatatattatatatcctttaaaaaccatttgaaagttacagacatctttacctcagaagcatcagcagtatctccacagaacaagttgctttcttacataaccagaataccattatcacacccccccagatttaacattggcgtgttaataatatagaatatagagaccatatttagatttccttaattgtttcaaaagcatcctttacagtttttttttaaatcaagatatagccaaggatcatacattgctttgcgttattatatgaactgatatttttaatctttaaaagaaaatacatttcaggaaattttattgcttgtttaatcaaccttacttgtgttaaaaagaatttataatctattatagcaatatgaaattatacaaagccaaaatttactctgtattaccagctgtttaaaactatagttacttctgatcctatagatcacaaggacatcattttatatacatgaaacatttaaacatcatttgatgtataaagttatatactgtattttatttttgtagagattgttgtggtataatgtgattagtgtgccaaagatttgatctgtagttttgatctgtgctttattagctcattgggaatatatgcagtacagatgtggtcagggttatggttttttctatgccaattactttggtttgctttctgcctatatatattgtatatattttcatgagggtgattggatgagaaaatgtgggaaaaccagtgtaaagagcttggattttggggttggtaaaagttgaatttgaattccaagctccactactttagttttatgtctataataaagatagaatacttagtttaaatgaccatggctttgctgaaatctgcttcctaaatatgtagtagggcaagcactactcgcagcctgcaacttatcattctttatcttcagaagtgtcatggcttttcttggccttttaatctctcacatatattttaaagttagttcttaagttccataaaaaatattgttgagatttcagtgggaattaaaccaattttgactggtttcatttaagaaggattgacatctttatggtactgtgttctctttgccaaagttttgtggaagattaagtgagatgatatatggacagagcttaatctagtgcctagaacttggtaaataaacactcagttactaatagtttatcatttttattatccattaccaatactagaagaataccttcagatcctttcatcatgatgagttatatatataaaatatagtgttatatttgaaaataacacttatatgctatatgtttatgcagtcaagaagaaaaaaagacatagtgtacttctttcattttaaaatgaagactaagagtacattaattattaagcaatgctatagaaattctaatatgcttcatggttttaaattgcatcttaatttgcaacccataatacagaataaagggtaatcaccttatataaagactttagaatgaagaaaaagtcaaattttatatatattatatatatatttatatatatatatttatatatatttttatatatatatatatatatatatatatatatatttttttttttttttttttttttttttttttttgagatggagttttgctcatgtcgcccaggctggagtgcagtggcgtgatcttggctcactgcaacaggttcaaatgattctcctgcctcagcctcctaagtagctgggattacaggcgcccgccaccacgcccagctaatttttgcatttttagtagaaacggggtttcaccatgttggccaggctggtctcgaactcctgacctcgtgatctgcccatctcagcctcccaaagtgctggaattacaggcatgagccaccgcacctggcccaaataatatatttttaaaatggtcagaggacagacagttcatatacatagaagaaatacagatcacccatgtacatataaaaagatgaagatgatcaacctcatagataataagaaaaaaagttattgaaattgcatttttactgatcagatcggcaaaactctaaaagtttgataaatctgggggaaattgtcattttcctaccttctggtggtagtataatatagtaaaatcttgtagtaggaaatctggcaatatctattcaaattaaaaacataattagtcctttaatagagcagtcccacttctgggaacttattccatagatatatccatatatcatacatatgaaatgactgaagtcaagattatttgataactctgaggaagggctctaggtagaaaggacaagagtaggagagagacttaattttcactatccttttgtaccttttgaattttgaaccatttgaatgattacctattcaacaaattaatattaaattgttacatttttccttctccagtactttccatctccctgctgtcttcatctttccctaactcccaattcttcttatccttccattactttttatatactcagtttgtgtgtgtgtgcaaaaaggctgattttttggtatgttgtcaatcacttaaaatgcttcctttctgttctatgcctttccttcatgtctgtaactgggtttgatcatcagctttatctatttaatctttcagtcttctttatttttaaaatttcagcttttatttaggtatagggggtacatgtgtgggattgttatatggatatactggacccaggtagtaagtgtagtacccaaaagtagtttttcaactcattcccctttcttccctcctgccccctgccatcatagtccacagtgtctgtttttctcatgtttatgtctatgtgtgctcaatgtttagctctcacttataaatgagaacatgtggtatttgtttttttcttcctctgtttgtttgttcagaattatggcctccagctccatccatgttgctgcaaacgacgtgatttttgttcttttttatggctgtgtagtattccatggtttatgtgtaccacattttctttattcagtccaccattgatgggcacctaggttgactccatgtctttgctgttgtgaatagtgtggcaatgaacatatgagtgcatgtgtctttttggtataatgatccttagggtatatacccagtaatggtctcaaaagaagacgtacaagcagtcaacaaacatgaaaaaatgctcatcatcactaatcatcagaaaaatgcaaattaaaaccacagtgagataccatttcagtcagaatggctattattaaaaagtaaaaaaaagattgccataaatatatacacttgctatgtacccacaaaaattaaaaataaaaattttaaaaacaaacaactacaaaatacaaacccacagatgctagtgaggctgcagagtaaacagaacacttatacactgttggtaggaatgtaaattacttcttctctattttaaaagagggtgccttagaattctgtggggaccacttcagaggcagagttatttcaattgcctgagacttgctgcaggccaatcgtagactaacaggtagaggttcaagaggtagggtacttaaccccgccatcaatttaaattatatatagtctatgaatgagttcatattattttcaaattacttttatttgggtgattataaacacagtttatcttgttttatttattttaggcaagagtgtgcaccccactggctaccccacagcctacgcctccttgctcaccttcatcacctgctaaggagtgtgttttggtaaagactccagattcttctccctgtgattcggatcatgatatggcttttcctgtgaaagaaatatgtgctgaaaaaggtagaaactttatttctataactcggttttaattttagcaactattaaatttcatgatttgtatatgtacttgttgcttactaggttttagtaaatcattttttctcacaaggaaatttaggaattgattgcgacttcttaaaagtctataattgaggccaggcaggcatggtggctcacgcctgtaatcccagcactttgggaggctgaggcgggtgaatcacgaggtcaggagtttgagaccagcctgaccaacatggtgaaacccctctctactaaaagtacaaaaattagccaggtgtgttggcacgtgcctgtaatcccagctactcaggaggctgaggtagaagaattgcttgaacccgggaggcagaggttgcagtgagccgagatcgcaccattgcactccaccctgggcaagggagtgagactccgtctcacaaaaaaaaaaaaagtatacaattgaatagatgcttagactactttaagtatatggtggtattaacaatgatgtcttctcaaggtattttttaacgcttcactaaatttaggaattatcacattaatggctaccaccattgtcattattattattaattataattgccattatttgtgtgctaaaatggtaagggatatctgaagcaatgtatcatgccatcctatggagttctttactgactactatctttttctgtccttttaaaaaaaaaacctttaggagatgatatgcctgccatcatgcttgttaatactccaacagttacccctactactacacctcctccagcggcggcagtttttaccccaactttgtcagatatttccattgataaattgaaggtatcaagcccagagcttcccaagccatggggtgatggagacctgccactggaagaagagaaccctaactcacctcaagaagaacttcatccaagagctatgtaaatgagaacatactcactagtaactgtacatttcaacttatgtttgacttatgtgatccattgaaaacatagaaatattatacaaagctttataaaccacagactaccttatactttgaaagaaagaactttcataagtgttgagttttgaaaaattatcaaattataccttcaccttttttcttaaaaggtttgaaacagctagaaataaaggtatctattatattgttaataaaatagaaaacaatttctccctattgtggatcattatttactatgatcagttaacttttatattattttatatctctctgtatggaagagctttcaagatggcctatgattaaagcatgaaaacaacttttaaaaatcttgttaattatagtagtgcagatttaaaaaaatattttgctaaaggagacatagtcttcgagtctgttttttatatcaaaatgaatacaggccttcagtgacctaacaagctccaaatatgtctttattttcttagtgtaatgtctgtggctaaggatgaagaaccagagagtatggatttccctgctcagcctccacctccagagccagttccctttatgccatttcctgccggcaccaaggccccttccccctcacagatgccaggttctgattcatcaacactggagagcacattgagtgttactgtcactgaaactgaaactttagataaacccatctctgaaggagagattttatttagctgtggtcaaaaattggcccccaagagtaagttaatttgtattagttgattttacttgttagattatgctaattccctaagtaatacttttctatttaaagtgtttttacttaactttcaagatttaacatggtatagtagaaagaatgggggactcaatgcaatttagttaacttttctgggtcttaacttcagaaagtaaaatcttcctcataatcccaccctccagaaataatatcactattaatggtttggggtaggcctttccagtcttttttgtctatgcatatatagacacataaatacatacgtatgtggatgtatgtttacctttaaaaataggatcttactatgcatattgttttgaaacctgaatttttttttttttttttttgagacaggttctcactgtcatgcaagctagagtgaggtggcatgatcatggttcactgcagcctcaacttcctgggctcaagtgatactcccacctcagccttctgagtaactgggactacaggcatgtgccaccacgcccggctaacttttatattttttgtagagatgaagtttcaccattttgcccaggttggtctcagacttctgagctcaagtgatccacccgtcttggcctcccaaagggctgggattataggcctgaaccacctcacccagcctgaaacctgaatttttttttttaccaaataatatattgtggatatcttttaatataactccatatttttcttatttttcttttctggctgtgtagtctgtttaatcccttaatagagggcatttagattgttttcaatgctttcagtctatacacaactctctaattaccatcctttcatgtatatatgtctttgtgcacttatctggtctcttccttagaatacatgcctaaaagcgaaattgctgagtctactttaaagatgcatcaccaacatgctttctagaaaggatttttttttctttgctctaagttctagaaaggatttttagctcttaatcagttttaattatatcaacagtatatgagaatacccgtttctcaatttcataactacaattgatatttatagtttttaatttctaacaaactggtaggttaaacaaaattctcatctttgttataaattgtacttcaaaaaaactggtaagattgagtagtttgtgaattacttgtttataaactttgccagtatttccattgcagtataattttgaatctaatatgctatggctttatggtcagattatttactaagtttgtgtttcttttttttttctaaacttttatattttaatttctagttttagaagatataggactgtacctgacaaaccttaatgatagcttatccagcactctgcatgatgccgttgaaatggtaagtaacgattgactccaacactgaattctgacaggaagaatatctgtatgaattggttgccactgatcaggttttttctcaattttttgagttatagacacaaaatttagtaaaataaccatgaaataatttagagtttcttgcacatttcattatgtaatcttataattatgagaatgaaaaaaagttattattaaccctcgtggctctagtagtaaaaaaatatacatttaatgtaattaggtaatgaaatctagctgattgcaaattgttacctctgtatgttgtctttacaatatttaagcaggatcttacctgtttaaaccaactctcttgtaatacatttgttatttttccctaaccatgattataattctttgtgctaataaatatttaaacttaatggcttaaaaagaaaaatgaggtccagggatgttaaccctttctagtttttatctagctctgtagaagcaaaagttggtatttaaaaatatcacattatatataaatatatagaagtgatagtaagaattttcttttgaaaaaaccgttaaggaatagaaatctttactttttatatatttttaaacaacctaagcaaggaaaggtaattgtactcaactatcatctatgtttattcacatctttttaaagcattgttgctgtttttttaagttatttcacataggcctatgaaaatacttcattaagaagttttttgataagattttaatgaaacaatttttaaacagtaattatttattgcaagtaattggttgagctaattgtgaagagagcatagcaatcacttttatgaaataatatgggaagaaggcataaatgagatatctttattttcagagaagcattactaacattcggcctattagtgtacaattatagcatttttctcctctctttgaactttttcaagtggcaaagcatgtttaaatttatttaaagtaaatagctaaaccaaaccaagactaaattataacttgtttctctttttctacatttgaaactaaattctaatgttgatatttttactatgcctaaatcacatatgctacaaattcataataaagtcaaatacaatagtacaatctggaaaaaccccaaataacttgaaatcatgtaccagtgggcattttatctatacatagctaggggatagggacttataatctggagttaataaactttatttcatgaaaaataaatacaaatactttcaatgaatttaaagtcatgttaatatctgtatttacaagataatctactttgttggactctgaggcccacactgttcctcattgttgggatgggcctattttgaggcatgaggaagcctatacagggtgctccagtgagggtcttcaataccaatgccctcgccaagtaagccagatgtcagcccaaaggcaaagggacattgaggtctatagctgccataccatacttctgcagtttttcatttttgcttgtggtccaagttgcagcattacagtgctttgcccccattgccacactgtggcattactttactgcagaaatatgaggaggaggctgtgacccaaaaacaatgatatcatataaaacatttatgattcatagtagctcaactgtgtgggacagacggtttgatttttatgtttttataatctccagtttatgttgtaccaaattatactgtggtttatatttgaggcaaagatagagggcttttattatagacaaatggaaatgagaactagatgaaaataaagagttcatctcctttccaaaaatgctaatatcatcatctcatgactgataagtttttattaatcttaaattgagaaaaatgcaattgttcgaaataatttatttttattaattgtctttatgtttcttttaggaggatgatcctcctagtgaagggcaagtgattaggatgtcccataaaaaatttcatgcagatgcaattctttcttttgctaaacaaaaccaggagtcagcagtttcccagcaagcagtctatcattcagaggtactttttaactttaatgacttttttttggttagatctaaatacaggaaaaaattaaaatattcttactactagttaaagcatgctagtattttggttttttcaagggtcagtgttacagcaactttaacttggaatcatggaactgtagagttttataacagaaaggaatttagaccatctgttccaaccaccttgttctactgctaaaaaagctgaagctttgtgaggattcattatgcaattatttattaagtatccattatatgccagacacaaccttggaaaagatacaaagataagtaagacatgacccctacctttaagcagcttacagtcatgtaggaagataagggcttacacaagtaattattcaacagtgcaataactaatcaaatagctgtatttacaagtactatatgaacacacaggagaaaagactctgcctgaagttagatgacacttcatacacaatattacattgatgtcagtctttaaagatggagtaggactttgcaggcagcaacgaaagggaaggacatttcagaagcagaaataccatttgttaagggatgacagccaagaaatattaaagcatatttggaaagtattgaaaatctctgtgtggctagaactttagatgaagaatcagatacatctggagaaggagattgaaccagatgatcataaagaacattttatttaggccatggtaaggcttgggcactgtggagcccatgaaggtttttggacaagggagttgccttaggaaggagtatgaagccataaacaaatgagggagacatgggggatctgtcagaacaccactggagtagtcccagcaagagagaatgagaacaaagacagttacagcagaaatagagaggagagagatttaaatttaagggcataggattgacagtaattggtcattggttgagagaggtaaagaagcttttttttaaggataatcttgaggttcctaccttaggagcttggatgggtgattatagagttgttggcttagaagtgcagacagaagagtgccagattttgtggggaaactaatgagtttgatatacacattatatttaaggtgcttaaggaaattccaggtagaaatatacaacattgtcattcagactggttaatgatggagctgggactaggattcttgatctatagtgctgtttctatcatatctggttgtcttcgcatgaacaaatgtcaactggctttagatgagctggagatctgaagactatatagggcccaaggagatggttggttttattttctgtttttatttttaaaactttaaatgattaggaaaggtaggagaagatataaaatttagtaatgggaaaaaatgaaggcttaacatattccttctgaatttaaaataattaaattttctgcaactttagttagcaatagatcatttcactggaaaaatcttagttgtgatatctgtgttgctaaattcaaaaacatactctcatagctgcagaaattaagatgattagtatcgaaaccagtaagctgagagagagaaaggagggagaggagagagagaaagcgcatgtgcgggtggaaaggagagagaaagagggagagggaagaagggagagagaatgagacaagcaaatggtacaaaaagaggtggcaaatagcagaagtgtctgcataaatttataaattccactgactaatcctagttttctttctttttggaaatcactaatatcaatgtatttattcgtgcaattgtatcagacgtttttatcttttagatgctgggaaatttatcttcattctttctttctcttttttttttcttcctttcatttttcccccctctctctagaactcttatttccagatattgacacttctacttctgtttttcttatcccttaaattttctgtctttcttttcttctccattctgggagaactccccaatctgatctgctaactattaatttgttctctgctatactgtttatcccgtttattgtgtttttcatacttgacattcttgttttttgttgttttttttttttgctttgcattttaatatcttttcttatcgcctactctgtgtctgtctgtctgattaatatcattcactttgttgtctgttttttttttcttttttaaacttattgactcctcaggtatctggttcttttgacctgtgagttcttatttcactgatgggatcaactattctgtctgagaatttgggtaaggataaaaccatggtctgtttcagagagttaaagaagaggggaggagagagccctagggaggagagccttaggcagcacagaaccacccttggtcactgtccctgctgtttgctgttactccactatatggctctcctggtgattattgtgtctttaagcccttaggaagacgttgctttgggagggtttgtaatccactagtcctggggcttggaggggaagaaggtgaaggaatgatgcccacggatgggcttctggacagatttcatctatagttgtcaccatagctaggccttcatgttccctgatattactctggggcgccagcatttgcagctggggttgttaataagaagacttttatggttgaggggcaagcagtaatctcaaattaatggaggaagaaacaatgacttttctccattcattcctctcacaaagcccctccacacagcctcctcgctaggatgcagcccctttctttccacgcgttccagtttgagttaactgtctgtctttccaggggcttttcacaacttttactttagttctcagaatctatgggttctttttcacctctgtagttactccagtgttgattttgagagctggcagcctttgttactgtgctgtcctggctagaccagcaatgcagaagttagaattctatcttctccagatctttttctaagcattaagcatttatatatgtataaaaatatatttgtgtatatgtatatgtgtgtatgtgtgtgtgtgtgtgtatatatatatatgtgtgtgaatctttttgagacagagtttcagtctgttgttcaggctggagtgcagtggctcagtcagctcactgcagcctcgaactcttggactcaagcaatcctcccatctcagcccccagagtagctgggactataggcgtgcaccatacctagctaattttttattttttgcagagacggggtctcactatgttggctaggctgatctccaacttctgaccgcaagtgatcctcctgcctcagccttccaaagtcctgggattataggcatgagccaccatttctggcttagtatataattttgaggtgtgtgtatatattgttgtgcaattttaaattttaaaaagcaggttgcaaggctttttaaaatttaacataaatcctgaagatctactatattctttttacctactatgtagtataccatagtttaattattctcctattgaaggatttttagattggttccaagtattctctaatcaaactatactaggtataaaatcctttttttgtactcatgagaaattatttttctagatttagatactaaggcatggaattgctggctcaaagatataagcattcataatttaaataggcactgaaaaattgcccctagctgtatgagatccctttcccatgtcacacataatgcttttaatcttaaatttttgccagtctgattaacagtgacattttgcatattttcttgtctaaagggctatgtaataagaactagtaatattgatacattataagttaaaatattgctttgctaagttgtggcttttctttgtgcttgaaacttcttgcttagaggggcatttggtcagtgaaagctcactgatggcaaaactgtaatttgtacatatatgtagatgggctaggtatattactctgcattataggcaacctgacttaaattggcatgaacttaagcattgagtataatccaaaactcagagatacttatgagtatgagaccattttgtaaataggcaagataagtcttcagtagggtcatagagtattcttaaggtgttaaatagttcagcagttgcaaatatcctagaaaacagattcacaacagagaagttactgtagactgtcagagtaatataggcattgtgaaatatttctcattaatttctggggaaaacataattgccgtcattctaaacactgcccaagagtctccaagggatttcatattaattatgaacagtattttttaatttaaaggatgttgaggcaatcagtattcctaaagaagagtcaggctaagggaataaggagagatagagatgtacataggagaatgaaggcaaattgaagagaatcttgaatgttgagctaagaagtttagattttattttatagtcaatggaatcatcaaaggtgtttcagcagtgatttcttcatatagtctagttaaaaaaaacacttgttggttgaaattaaaccccttttaaatgagaaacatgggagctttcagataattggaattttgcttcagttcttaattagtaaattcattaattagaatatctcaagtcataaaatgtactagtgattaggatatataattttttaatacagaaagaaaataggagtcttatattttttcatttgttcatttatttcataaatttcatttaaaacaatttttttttttttttgagacggagtttcgctcttgttgcccaggcaggaatgcagtggcgggatctcggctcaccacaacctccacctcctgggttcaagtgattcttctgcttcagcctctcgagtagctggggttacaggcatgcactaccatgcccgctaattttgtatttttagtagagatgggtttttgccatgttgatcaggattgtctggaactcctgacttcaggtgatccacccacctcggcctcccaaagtgctgagattacaggcgtgacccaccatgcccagccaacgatttttgtgctttttgtattttttatttttcccaaggaaaataacattattaaatatgactaaagtattcttctataatctgtatacttttttttttttttgagacagagtatcactctgtcgcccaggctggagttcagtggctcagtctcggctcactgcagcctctgcctcctggtttcaagtgattttcctgcctcagcttcccaggtagctgggactacaggcacccgccaccacgcctggctaatttttgtactttttttttagtagagacggggtttcaccatattggccaggctggtctcaaactcctgaccttgcgatctgcccgccttgacctcccaaagtgctgggtggtgtgagccaccacgccaggcctctatacttttataaaaatcttattattgatatatggggtaacctttatgctgtttaaagtatattattctcctcatcaattgtttattgtaaagtttacactaacaaactttaggcaatttttattcatgaagaatgagagaaattttctgttattcccattttaagctgtatgaacaatgtgtaatgcataccagcatttagtggttttgattttttttttttttttttgagacagagtctcgctctgtcacccaggctggagtgcagtggtgcaatctcagctcactgcaagctccacctcccgggttcacaccattctcctgcctcagcctcccgagtagctgggactacaggtgcctgccaccatgcccagctaattttttgtatttttagtacagacggggtttcaccatgttggcctggatggtcttgatctcctgaccttgtgatccgccgcctcggcctcccaaagtgctggtattacaggcgtgagccaccgtgcccagctgattttttgtgttttttttgacacagggtctcactgtatcacccatgctggagtacagtcgtgcagtctcgctcactgcagcctctgcctcctgggttcaagctagcctcctgcctcagccccttaagtaaatgggactacaggtgtgtgctgtgatgcccagctaatttttgtattttttgtcgagacagggtttcgccgtgttgcctaggctggtcttgaactcctgagttcaagtgatccacctgcctcggcctcctaaagtgctaggattataggcatgagccaccgtgctggccccattgagtgttttaaattgtaatataatttttcttatgtattttattgctatttaattggtgcttgaaaaactggttaatttcataaaatatatgaaattattatattgaaaacaaagcctatcacgaggcttattagactaacttcttgaacttttcttgcatgtaatgtatatgtggcatagaaggcagtttgtaaaataccttccaaggagtcaaagggtattgttcatgatatttggcaaagatttcctgttttgacttgattttaatataatggttttaacaattgtttctgctttttaaaggacttggaaaacagtgtgggtgaacttagtgaaggacaaagaccccagctaacagcggcagcagagaacatcttaatgggacattctctctatatgcagccacctgtcactaatacacagtctttggatcaacaatgtgatcctaaaccattatctcggcaatttgacacagtttcaggtagacaccaaaatattttttcttgatgtgtcatagtagtatccctaatctgagttgaggaaagtatacctattttcagataggggcttgcaaaatttctttattaaaagggattttaataattggaaagtttggtgataactttttttatagtatatatagcagtgtttccccaaatgtgattcatatatcagtgttggtacatgaacctttgggtggtatgtgaattaattttggtaatacacatacatacacttaaaactttttaactgtgatacttttattttatttcattctatttatttatttagagacggagtcttgctctgtcactcaggctggagtgcagtgacacaatctcggcccactgcaagctctgcctcccgagttcaccccattctcctgcctcagcctcccgagcagctgggactacaggagcccaccaccacgcctggctaattttttgtatttttagtagagatggggtttcaccatgttagtcaggatggtctcgatctcctgacctcgtgatccgccctccatggcctcccaaagtgctggaattacaggtgtgagccaccgcgcctagcctattttattttattttatttttttggagacggagtcttgctttgtcgcccagggtggaatgcaatggcacaatctcggctcactgcaacccctgcctcctgggttcaagctattctcctgcctcagcctcccgagtagctgggattacaggcgcctgccaccatgcccagctaatttttgtatttttattagagacagggtttcactatgttggccaggctggtctcgaactcctgacctcaggtgatctgcccaccttggcctcccaaagtgctgggattacaggcatgagccaccatgcccagccgatgcatttattgtaatatgtactagaaaaatataacgaatccatgaaaattgacataacagatctttaggacaaggttaaattagataatactgtagacatttattctttatgctatatgaatttcagtagcactctgcattcaggactattttagaatttaaataaactttctgttgtgacacactggaaataaggatagaatagagaataccaatcactagcatatatagttgactctcatctatggaccattgttatattctgtggtcaccacaaacatattaacaagtattgaaccattactcctaggggaaatacaggattaggtttctgtgagcctctggtcataacatttttatcaactgatcaatacataatctggttttatttatgtttctgtttaaagaagtcttatttaatatatattttgaattcattaatattgaactcacagccattgaactatccagcagtataacttgtgcctgaaggaagcctatctaacatgtatattttctccataagacacagcggagcctttttgtgcttagaaacactagacaggccagatgcggtggctcacgcctgtaatccagcactttgggaggccaaggtggcagatcacctgaggtcaggagtttaagaccagcctggccaacatggtgaaacctcatctctactaaaaatgcaaaaattagccgggcatagtggcagatgcctgtaatctcagctacttgggaagctgaggcagaagaattgcttgaacccgggaggctcagagggcagagggcagaggttgcagtgagccgaaatcacgccactgcactccagcctgggcagcaagagcgagtctctgcctcaaaaaaaaaaaaaagaaaagaaacactagacagtacttcagcactaaggggccattttaaacagtgaaatcaccaaaaaaaaggggatgaaatctgaaaaacagctttacgtatactgtgaaaaggtcacttgtttacagtatgagagctggaataaggtggaatgtatcgttgttcagcatcaactggaaaaatgcatgttaggtaatttaagtttttcaccactctgtacatgtccacaaatgaccacaaaggtgctgcaagtattgatttggggggttataaatacgttttagcgagtagataaatttgcaaatatgtaatttacaaataaatgaggatctgctatattcttattattgatttttaaatgcccattgtttctttctcttaagtgaaaagaaacttctggaggcatgcagatttgccagaaatcagaaaaggaaaagcctgaagtatttagtttcatattgagtgaacaccttgtatcattcagaattgggagaattccgagactgaatttcccatgtgaataaatgtaaagattggccttatttctcattttgtacacataatgagagtattaaatgttttacattctttaaaatttgtaggattcaaatggcatgaaatgtgacttacatttatgtccagctaaatttgcagaatgcagttaaacagagttaacactaggtggctctcgcagatcacttgaactgctaggtacttaagagctactaggtatctgagagcaactaggtacttagttgaaatgttacagaataaactccctgaggagatagcctcttcagtcctttttaaatatctggtaaccctagcagattacctatagtacagtgcatttttaatcttaggtacattgtaggtatttgtttaattggaaaaaataagtaatatggtataacataagattgaacacatatgtaaggcagtatagcagaatagctaagagtttaggctttgagagtttcagaaatgggtttgaattccagctctatgtatctttggtcaaataacttaatgttcctgaacccaaatttctttatgtgtcaagtggggataatattgctatgtacgaaattaccccacatttaacagctgaaggcagcaaacatttattatttcacagaactctgaaagtcacaaatccggtagtggcttacctgggtggttttcaggatctctcctgatgtggcagtcaaggtgatggcttggactgaggtcatctgaaggcttgactagggttgaaggatccactttccaagttcactcacatggatttagcaagaggcttcacttcctcaccatgttaaccagtccatagggccgtgaatgatgtggtagcagacatctcccaagagaaagtaagcaatcaagatggaaaccataatgtctttttttttttcttttcttttgagacagagtctcgctctgttgcccaggctggagtgcagtggtgcgatctcagctcactgcaacctctgcctcctgggttcaagtgattctcctacctcagcctcctgagtagctgggactacagatgcacgccgccacctcgcctggctgatttttgtatgtttttgtagagacggggttttgccatgttggccaggcaggtctcaaacttctgacctcaagtgatccacccgccacagcctcccaaagtgctgggattacacgtgtgagccactgcgcccagctgataatgtcttttataacctaatctccaaagtgacatgccatcacttctgtcatattccattgataacacagaccaatcatggaacaacttaagaggtgacttttaaaaggtgtagataccaggagggcagggatcactgggggctatcttggaggtaatagtgtctatctcattacggttattaggtacatgtatttgacaatgcatgtaaagtactaagctcagtgcttggcacatggtgttgttctctttaataatgcttggagtatgaaaagtactatcttatatgtacttaatagaatcagaaactatcaacagttgactaaaaggactttgcctatagaaaactaatttgttcctcttgtttcaagattttctcctggtgaccacagactataactgtggtccatagatgagaatcaactatatatgctagtgattggtattgcttttcgtcttgatttttaataactttgcttacagagggtcatctcttcttactttgcccctccccacccctgctaattttcaggaagtgtcctattttctgtagtcctctatcactgtctccattcctgaggctctcaggttgggttgagtaactgaaagttgcaaaattggctttgaggagttgtcttgggaaacctaaaatgtaagctgtaatttgagtgaattatttgtggaccctgggatatactaccaactacagctttttatttactcaaaaaacctgtattgaatacccactgtatacctagaactatgtaagtactacattaagcactcaagattcaaagatgatagatatctgctctcaagatatttactaactagtgtgggagaaataaataacaattataatattgtgtgactagtacaacacagacggctgtgggagtgcagaggaggaacttaactcatttgtgagggcttagaaaaggttttctgcaagatccaatgtgaaattgaatcttaagggaattagccagatggtaaattatgataagaatattccagtttgttcatttacttattcagaagatatttttgagtgcctgctatgtgctgagcatgtgctaggtgctaggaatatgaaacttggtaaggccctgttcacaatgattttttttctctagtagacatagtagataagaaagcaaaaacatgcaataaattactgtagttattgtgaagaagcccgtataggatggaggtacaggtcaattgtagttgaagggattcaggaaagacttcatagatgagggaagtcttgcttgaagtgactcctcaaagatgaataaatgcttgccatgtggtgagtgaggagggacctttcagacagaatatgcaatgagacaggggacaaaggcaaaaaaaaaaaaaaagcaagggttaatcgtggaaatgcagtgtttttgtcaaagaattagagcttaagatgcagtgaaattgcagcagggagcagaaaccaggtcatgaaaagccctggattatctattaaggagtacagtaaggatcgctttgtatacaaaatgggaaataataacagtcttactttttactttatacttattcccatgaacaattcagccttaagtttctgtcagttctgaatgttgtgtgatattcatcagtctgttaaagattgtaagtaaatgagtgatgtgatcatatttaccttttatttagcaagatcatctgagatgcaatgtgatggatagattggaagagttaagactggaggcaaggagcctgattagacaaccattaaagttgacctgatgagacattattcagtaatgaggatatataaaaagggagatttgagagagaattaaggagatggacaggaattcatttgaatgtgagcagtacaaaagaagcagaaagtctaagaaatccctaggtttctgtctagaattattggatagatggtcatctcagtcactgagagagagcgaatatggaggaaggacagaattaggaggaaagagattgaatggggtttatacatactgaatttgtgatgcctttgactttcatacaaatgaaaaaaatccattagatatgccggaccaaaaactcttgctggactggcaattttaggcaaacttagtcttctctaaaagtctgccatggttgctttccactataacaaaattctaggaaagtaaaattagggatttctagttatgattaattaaattaaatttgacttgaatgaaataatattttaaatatccctcttttaaaggtctaacttgcattatacaggtaagacacccacactcaatgagcctgcttgttagaagacacagcaaattcagcactgttatgattgctgtcagggaatcctttcctgacccttatcactgggttaaatacctgtcatgtgtactctctgtaattctctaatgtcacctgcctaatgttgctcttatcacactgatattaatctcatgtgagggtacggactttatcttgtgtactctcatatccctgtcacctagcaggttatatagtatacagaacatagtaaatatctgttaaattataggatggtgtattatgtgaaagctattacgcactttttgagtgctccccaccaccacttttttcctgtcccatgtatgccttatcccaagtaacccatgttaagattctggcatataaccttcctgttttttacctcacacatataattatatgcacacatgcatgtacaatatatatggtatgtgtgattgccattattttacaacttaagatcatatcttgcacacttgcctgcattttgtgttttacccagtaaacccttagattattccaggtcaaccggtattacttaaatttattcattttaatgattacgtaaaacttcatagtgttgatttccaataatttatttagttgtttctctattgatggatgtttattaacatgtccctgcactataaacaatgctagagtaagtatccacacacacatcctaccagattgttgtgttttatatactcctccttactccagtgtatgtactcctgggaagctcttctatacacgagcaaatgtatctttagtttagaaatagataatgccaagttgctttcttgaaagtttaaaccaatttatttttatcggcaatttattagtgccctttccttacatcccctcctgaaattgtgttgattagtttttttacatacctcagtagaaatatgaagatatgtttctgactcctggtgagtttatatgtcttttcattcatatgtttgttggccatttgtatgtgctcctataaagttcttttcccatctgggaggttctcagtttttcttgttagttttaaagctgtttctatagtttagatgttttctactatttgtattgtaaatatctttatccaaatttatattttgctcattgacattgttgatgatctttttgccatataatttaaaaatttatatgtagatatttctaacttttatactttccgtgctttcatggcttgattatgttgctatactgtaggaaaaagctaatcacttttatctatttatctgttatccagtcacattaccaattctcttattagttctaatagagttcttttgttttcattaaagtctcttgggttttctaggcatataccatatatcagcaaaagagttttcaatatcttctttttttaacattatatgtaattcttttctcttaattcatttgccactcttagaaaaatgttgaacaagtcacataggaatagaaaaaggcgtatcagaatataaagagacaaataaagcctgaaacattagttactctaaattataagtattattaccattatttaaattaatcttatgttagataattaaatgagaatcaggtaataattttgataaattgttttatacagatttaataccataatagtaaaaatcaaaactcaatgcggctggacatggtggctcatgcctgtaatcccagcactttgggagaacgaggtgagcggatcacttgagcacttgaggtcaggagttcaagaccagcctggccaatatggtgaaacgctgcctctactaaaaatacaaaaattagacaggtgtggtggcgcgtgcctgtggtctcagctcctagggaggctgaggcagaagaatcgcttgaacccgggaggtggaggttgcagtgagctgagattgcaccactgcactccagcctgggtgagtgagtctccgtctcaaaaaaaaaaaaaaaaattaaaactcaatagatgtatttcgctttatgtaaaagcccattgaaaacctagattaacataaaagatcaatcagagtgattatttgctatatctaggaaattgtcaacagaatgcctttaaatggaaaatatctatggcgtctttgaaatattttttcaggctgggtgcagtgcagtggctcatgcctgtaatcccagcatgggaggctgaggcaggaagatcactttagcccaggggtttcagaccagccttggcaacatggcgaaaccctgtctctactaaaaatacaaaaaattatccaagtgtggtagcgcacacctgtagtcccagctactcaggatgctgaggtagaagaatcacctgagcctgggaagtcaaggatgcagggggccatgatcatgccattgcactccagcctgggcaacaggagtgagactctgtctttaaaaaaaaaaaaagtgtatatatatatatatgtgtatgtatgatttttatatatatgtatgatttatatatataaatcatctatatgtatgatttatatataaatcatatgtatgatttatatatatgtatgatttatatatatatcatgtgtatgatttatatatcatatatatttatatatgatatataaatatataatatcatatataatatatcatatatatgaattatatatatgatttatgtatataaattttaaatatatatatttaaaacttaatttgcatataactcttcaggtctatttctattgattatattttaaaaggttgtctagcaagactgtgaaacagagagcagtgacttaattcctctgtgcttcttgctagctctttgattttggacagttagttaacttctctgaaccttagtaatgtcagtgagagacagttactatgatgtctaacctatcttacagaatgattgtaaagttcaaatgtaataagataatgtactcatatatgaaagtgcttggagtatatagtgcaatacaaaggtacagtggttagatacataaatatctctgctcttgtcttctttttactgatttgactgaggtgccatttatttatttatttatttatttatttagagacgaggtctcattttgttacccagactggagtgcagtgatgcgatctcagctcagtgcaacctccgcctcccgggttcaagcgattctcctgcctcagcttcctgagtagctgggattacaggtgccatgccaccacacccagctaatttttgtatttttagtagagacaggtttcaccgtgttggccaggctggtctcaaactcctgaccttaggcatccacccacctcagcttcccaaagtgctggattacaggcatgagctactgcactcagccagaggtgccatttagataagaaaataagagcttgatcacttgaagaacaaaatctacagaatagagctaggcaataccaacattttccaggcaggaaattgccctttgctttaagattacattttagatagaaagtattctattgactcttagagataggaaaggtaagcaggagtattaagagttcgtatgtgggaaggaggctgcagatgaactgcatgggcaacttgttgattggaactttacatagaatattccatggatttgtttgaacataggtactttttgcattctctctgagttttggttttaattgcagtgaaggcttggtccaggtgtttttgtttgaagtacactgctagttctaattcagcaggtgagaaatattggtggttttagtcaactacttgttcatttttgaagataaatttaacactttattttaactttttatttacatttttgataacaggtagtatttatgaagattcatgtgctagtcatggtccaatgagtttgggagaattggagttggagccaaattctaagctggttcttcccacaacacttctgacagcacaagaaaatgatgttaatttaccagtagccgctgaagatttttcccaggtaccaaattaatagcacttgtattttacttaaaatgagaattgaaacactgttgccttagcgtggtaccccgtcaagagccaagcctctggagtcagatagcttcaaatcatgcctcctttatttcctaactcaagtctgaatataaatctagttcacccaagctgtgccctagaacacattacttagcctcttttaagccttaattccctatctttaaattaaagaataaaataatggccaggtgcaatggctcacacctgtaatcccagcactctgggaggttgagacagtggatcgcttgagtccaggagtttcagaccagcctgggcaatgtggcaaaatgccatctctacaaaaaatacaaaaattagctcggctcctgtagttccagctacttgagaggctgatgtgggcagcagattgcttgtgcccgggaggcagaagttgcagtgagcccagattacaccactgcactccagctggtgacagagtgagactcttgtctcaaaaaaaatgaataagtaaataaaacataaaaataatatatataaaagtaaggtagcgatttcatttacatctctgtatctgcatgcaatacctagctcagtaatttacatatagtaggtgcttgataagtgtttattacattgaaatttgtaaaaagtgtttcataagaaatgtattgcataagaaatttaatgctgaggtaagccaatggcccatgcaatcttgtgtactgaaaaaataggttaattactcaccaagatgttaatctaaaaaagttcaatattaagtagttttttatttgtgtattggcaattcgttcaaaattacccattttgaactaatttatgaataagtattcatggtattatgcagcaggacatgttacggatgaaaccaaaaaatacgtaagataaagattgtttatggaacacatgattatgtggggttcagtattaccaatctgtgaccaagcaatgatcaggaaaaactagttaataatgaaaaagtatctgttaataacttcggtataaaaaaaatttttgtgaccatgattaggcaaacatttctgggatatgataccaaaggtactatctatgaataataattttttaaattggtcttatcaaaaataagaacttctgttcttcaaaacacagttaagagaattaaaaggcaagccactgactgggagaaaatatttacaaatcacttatcttatcaaagacttctgttcagaatatataaggagctcacataactcaatattaagaaaacaaacaatccagttgaaaaatgaacaatagatttggaacagtcctttacccagagaagataatataaatggcaaataagcacataaaaagattcttagctgggcgtggtggctcacgcctgtaatcccagcactttgggaggctgaggcaggtggatcacgaggtcaagagatcgagaccatcttggccaacatggtgaaaccccatctctactaaaaatacaaaaattagctgggtgtggtggtgtgcacctgtagtcccagctactcaggaggctgaggcaggagaatcacttgaacccagaaggtggagtttgcagtgagccaagatctcgccactgcactccaccctggtgacagagcaaaactccttcttgaaaaaagaaaaaaagattctcagcagagttagtcattaggaaaatgcaaaataaaaccacaatgagctaccaccacacatccattagaatatctaaaatctaaaaggcggtcatgccaagtgtcggcaaggatgtggagcaactgaactctcatactttgttgattgggaatgtaaaacgatccaacccctatggaaaagagcttggccatttaaaaatatacacccaccatatgaaccatgcatttcactcctagtttctcaagagaaactaaaacatatatttacacaaagacatgtacgtgaatgttcatacaaccttatatttgtagtaaccaaaaactgaaaacaacacaaatgtcaatcaactggtaaatggacaaattgtggtgtatcctgtacagtggaatacttagcaaccaaaaggcatgaactatgaatacaaacaataacatggatggttcttacaaaagttatgttgagtaaagaagccataccaaaaaaaaaaaacactgattttatttatataaaattttagaaaatgcaaactaatttatagtaatagcatttcagttattttggggtgatggtaggagttagaggtggaaagggcaagaaggagaagataaaagggtgtgagaaaacttttgagattgatggatatgtttattgtattatcttgattgtggtgatggtttcatgggtttataggtaggtcaaaacagcaaattggacactttaaatatgtgcagtttattgtctgttacatgtatctcaataaaactttaacaataaaagaaagattacttccttttaattgatggcttgttttagaataaaactataaagtgttaccagaagaaagggcctcaaaaaattcccttgttagatttctttagctagcagggacttatggttagtaataatagcacacatttatagtgctagatgctgttctaagttttttacgtattttaacttatttaatcattataacagcctaatgaggtagttgttactattatccccatttcatgaatgaggaaattgaggtattgagcagttaaataacttgcccaaggtcaaagctagaaaatgccttacccagatttgaacacaggcagtttagctcctgtggtcacagctcttattcgctgtgagtaagtaaggaaaccaatagaaacgttcaaagtctcagcagccagagccagaggtagtcctagtacccatcttagaaatacacaccaagataatatttccttcgaggcagaaacatacatgactaacggctctaaacttggaagaccagagttaaggctagttattattactgcagcttagagctactaatttttacccctagataaagaggatgcctgtcagaggtgcagtgattacattgtgtccatgtggacagatgttttagattcttctatggttgtatttattgataagggtccagggatttctttttaagttcctgttaaagctattttcaggggctcatttataattaagcgcataaaataggaaagagaagaaagaaaatcacacaatttgtgatgtgtgattacgaagagatttatgactactgtaaatttcaaatttggttatgttatatgagagatgatagtgcttatggtggagcgtatgtttcttgaatagcaaatggaagataacaatacctactcacacttctgagaattaaatgatgttactatatataaaagctcttcgaaaattgcagtgcattatgcagattttcattttatgcaaaaagtggttatatggaagagtttgctgccaaattaagttcttatcctgtctaaatccattatatgtatataaagtagtttgattcataagtagctctgaattctctaatgaaaatagacagaaatgacttgaatatttgaaatctgtatatatgatccaaatctttttaaaggtttttttttgcaacgtcttttcttttgtaataggtacctcatcacctatttattggtagaagtgcgaataaataaaaagcaataaaaagcaactagaaagcaagcatattattaaaattttataaacacttgaataatttgacttctcagatttttttaagtaactaaaaaataatattatgacttcatatcttaaattatttagtaccaactaaagcaaaatcaggatgttaagcaagttgaacacaaaccatcacaaagttacctacgtgttagaaataaatctgatattgcaccttcacagcaacaaggtaagacttgtttttatgtaataatacaatagtttgatacttgtctgaatattgaacaaatatgagaattctttactttttatacatcccactgctctctaggtttttgttttcttttgttttctctcatttagtccatttacatgaagaatcggtattgtatttgactatgttagttctttttaccagtaaacactatttctagtggattttttaaactcttagctggtgtctttcctttacccttgccttttagttcttgttcaattgaataccaaggtctttttatctgtatataggtctgtttgacattacaatatgttaaagacagggattatggctgtatttaatatgctttgtaaagcacattatttagtgcgtggtggtgctgaccaagtataacttaaaagcaattgcctctcatattacatactgtgatatggatgaccatatcatagttctttatcaaactcgtgtggttacctttaattccacagtcagcgttcaagcattttgatgttgtctctatgtttctacaaggctgttggccttgtgttttgtttgccatcttgcttcttagtcatttacattttctataacctaaaatctgaaatttggcagtagaaattaagatctcttctgtttaaaaactttctgcccacaattctggaagaagtattagaaatattttgagaagtggaatttttcttttttgcttttataactgtgatttttatttaattttcaaataatatttaattgagcaaatgcatattattgaatgccggtataattgcgaatgtaactatgcatttggtgttttgggaaggacctaaatgaggaagtgctcaagatagtaagattatgccacttaaggtttaggttttcactcttccatttgttgtctgttcccctcttgctccaagttttcagaactttgtcctcctgaccctttttttttttaacctcaccatagtacgttaatattaatgtactatggaaaatacctataaaactcttcttctggtgatttaagaattaatcatgatagtatatcgatatgggcagataaatgtttctaagataatgtcagaatttacttcatgttcttctactgagttctcatttatgaactgtccttcgcagtcaatgatagtttctttaatgtttttaaaaatcaatcatttttggcattacaaatgaatttcattttcttgaggatgttgtatgtaatgaaataattatttttctcagctgataggaaaatgtctctggtaagatgttagctggtagaaggaagttttatgtggaaagggtttacaacagttggatttaatacatttgaaatgttttacatttaattttacatctaatacaaaaggtaggagagcagacctataccagccttgactaaaacaaataaataccagtgggctataaagagaacattttaaatacaggcgaagtctttcactctataattggtacatatctttatactagaaaatttcttgaatgaatatgattgccttggcaaatataatcagttatgacttttttccccatagattttgtgggttttattattttttttctctgatgaaactctgagacattgccaaatgttgcagaaaatagaagtcagagtgccaaaataattctctggagctctcaggactttgggtgaccttgaaggaattcaatcctctcatacatagaaaccttgaagataatgaaggaaattcaccttatcacaggggaattaaaaccacatcttttctagcagataaatgcttccaagaatactagaaccccaaattttggctatttcagggggaagtatcatgtatttcacttgaaatgtgtagtagtttaatatatgtctataaagaaaggagcagtagcagctgttttaatgatcatccattaaaaattaactgaagaatggtaggacacagattccagcaccatattgctaggaacttagtaaagtacttagtttttttccaccttgattattactttcagattttaatataaaagagaggaattcattgttctgacaaatggtatctttggagcctttaagagtaaaaccttttaatttggtattgaatttattgggtctatctttgaccacgtgataccacttacctgattctatgtactgattaatgtatctaacagttttatagtgaaagtactttttaaaaaagtatttgaatggtcatttctatttttccccctttgctgtacaagttaatttttactcatcttttgctgtacaaattaactttcatcaatacaaataagaggctagttttaagtcaatttatttgtcatgagcccaggaacaattaaattctataaagtaatgtattaaaatagtacactttaaaaattattttccttctttttttctctttaaattttaagaccatcataataaattatcattacaaagtcaaacatactatatactactatcagtcaatggggaaaaaataagtcatatgttttatggtaaaatgctgtaatagattggattgtcaaatttgcttgaaaaaaatcacagcagtttttagtttttcttatttgtagattacacgttactcagaaaataagtatcaaagtgctaaaagtaataggtgtaattgctgttatttgtcaaaatcagtttacatttttgtgggaaatacagaatcacaaatatttctttctggcattatgtcctgagttaaattctagaaaatttagcaccttttatactcatatagctgtgacaataactttaaatatgtgaacattaggaaattcaaagcttatatattcttagaagctaattttgaccacgtgcgcaaattatttttcttttttagtagaatggtgcattttttgcctttgtatttgaaatttagctaaattacaatagctatcagaactacaattgaccttagtaatttcaaaaccatagttataagggttttaagttgatttttaaaaatcttaagatatgatagggatttcaaaactatgtgtgtgtatctctgatagggaggggttggggcacagactaataagtgtgccaaaaatctgtgaatccaaatgtgtaacaagtgttgtctgaataaatgtccacaaatccatgctattattggttaacaaaaaataaattcactttgaaatgttgctgaatttgggagttttgtttctacctaggatgaggaaattggaaagagtgtcactttcaccctaactataataaaatgtcagataaactacaaaatcattaacatttcttgaacccatcagagagcttctgatgcagagcaactaagtagcctaaagtccaaggaaagacagactcctccaaaaagagatgagacacaagcactgtctcacttgtgacagagcatggttacaggaagagacaccaggcaccaatcaagcagataagaagtatttggttaaactttttaagtgggtttctaaaggccaagtatagaaccattggtagtcacagatacaagtggagttcacacccacttgtaggcatcttctgcacagacctctagagaaagattgtggggaaaggcagagagtctctctcactggtgcaggcctgaatgagaggagtggctgtcactgccagaaagacaggatgccccactttgacccttctcctttaagaacaaaagccttaagccactgaggaaggggcaacacatctgttatttccagggtataggtgaaaacctatttggctgggggaagggtaaagaaaaaaaaagaatccactcctggcggagaagaaggaaatagtcttggtcccacaatcttttattagcactattagaagtttcttactgttgggagagtggttggaaactgtcctgcacaaaatttgccaaagggacaaggcagaatttaaaatgtcagttccctccaaattgatctatagattcagtgcaatctcaaaaacattccagcagggatttctgggtagaagttgacaagctgaagctaaaactcttgagaaaatgcagaggacctagaatagccaaaataacttttaaaaagaaaaataaagttggaagattatactatataactctaagacttattataaagctacagtaatcaagacagtggaatattggcataaatatcaatgggatagaatagagaattcaaaaaaaaagtccacacatttatgattagttgatcaattgatttttacaaatgggaaagacgattccatggagaaaggataatcttttcaacaaatggtgtttggacagagctcatctatatacaaaaaaaagaacctcaatctatatttcaccaacacacaaaaatgagctaaaaaatggatcatagatctaaatgtaaagcctaaaactacaaaacttctagaagaaaatataggagaaaatgtttctttgtgacctttggttgggcaaagatttctaagctattgcagaaactaatgataattggacttaatcaaaataaaaatttctgttcttcaaaagacagtgttaagagaatgaaaaaggacaaatcacagactggaagaaaatatttgcaaatttgctttctgatgaagcagttatgtccagaatatatttttaaaccttacaaaactcaacactaggaaaacaacccaatttttaaaatgcataaaagatttgaacagatacttcaccaaaaaagaaatttggatggcaaataagcacatggaaaattgttcaacatcattagtaattgggaagatgcaaattaaaaattaaataccactgaatacccattaggttgactaaaatcaaggaaactgatactaccatgtgttggtgaggatatagatcaattctaattctgatacattgctggtgggaatgcagaatgcaacatgcaccttggaaaactgtttgacagtttcttataaaattaaacataaatttaccctatgactcagcagtccatttcctatgtattcattcaagataaatgaaaacttattttcacacaaaacctgtactcaaaacttttttagcagtttattttataattacccaaaactggaatcaaccaaaatgtccttcaacaagtaaatggataaacaatctgtgtggtacatccatacaatggaatagtactcagcaatgaacagacgtgaactactgatacacacacaacagcacagatgaatctcagttgcattaaatgtagtgaaagaagttaaaaggctacatactgtatgattccatttatatggaaaaggcaaaatttattggaaaaggcaaaactatagatatggagaacaggtcagtggttgccttgaagaagagtttgacaacaaatggcaggagggaacttttttccattttgatggaaatattatatatcttgattggggtagtgtctatataactaagaatttttcaatggttagtcttactggttataaattatacttcaataaaatgatgtacatattactaagtttatgacacttttgcttattatgaattttcttaattagcttatactaaaagcttatcacttgggaaagtataaaaggttttgttgttaaaaggtgtgtaaatgtgatactgtattacatttatttactcttacatctttttcttatattaacactttaggaggagatagtttgatgtattttataatacagtatattttcaatacagttaaattggatttttaggtgtttatttaaaaatacattccatttagactagaaatctgaaacatttatgttttataattaatagtgactaactggaaacaaagaaaaattgtatgtgctaatctacagtggaagtactcttgtttaaaattttcttttttagatttcagaaagggaagaactgtcagctcaaaaacttgtgttttttactggcacatccaatataatgtgtaatcaacacagtttaactcagtaaacattaattgagggccctccacactctacgctactaagcttcaatgcctttttgcattatcttctttccacccagagttaccttctctccccacttctatatgcctacaaattacttattcttcaacattcagctccatctttctgagttcttactgaacctccgattgaaaacgtcttattcattttaacccactctcttcccctagctcttttctgccttgaacataatcataatcttaacaacagttttttgctgggcacagtggcccacacctataatcccaacactttgagaggccgaggcagatggatcacttgaggtcaggagttcgagaccagcctggccaacatggcaaaaccccgtctctactaaaaatacaaaaattagccggacgtggtggcacatgcctgtagtcccagctacttgggaggctgagacatgagaattgcttaagcctaggaggcggaggttgcagtgagctgagatcgcaccactgcactccagcttgggccacaaagtgagactctgtctcaaaaccaaaaccaaaacaaaacaaaacaggggaatacatttaccagaggtttgctaggtgtgttctatgttaatttcatttattcatcacaataccatgccatgcaggtagttttgtttgtttgttttatagagatagagtttcactgtcacccaggctggagagcaggggtatgatagttcattgcatcctcaacctcctgggctcaggaagtcttcctgccccagcttccatgtagctaggactacaggtgtgtgccatcatgcctgactcaggtagttttattcctgttttacaagagagaatgataagattcttgaaggttaactaattttcccaaagcacataatttagaaaatgaagatctggaattccagcccagatcgacttgattgcaaagctgatgctcctttccttgtgtaatactatttattgaataagcatttaataaatatttatcgtgtgacttaacagcttgttgataagagctgcttttatcatctctatatttccaggactgattatttaatattccaaagaaagtgatatatgggatagtgttgtgatttgtttttaagatatgttatctgtttcttatttaagagagcttgtttcccagtgtagcactgtggtgatcagtaaatgttcatggaattgaatttgatgattacatcatttgctattaaccccaaacaacatttaattctgttatttagtaataagacggaagaaggaagggaagagaaaaatgagaatatttcattacaatcatttttccattactgtctctttttaatgtagacagtcgtgcaaacagccacagtggactaatctaaagtgatttttatttgcttttccaaaagattgatttcttttatagtattaacatacatttttattatttgaggacaaaatagttgaacagagggtaggggcagccgagaatatgcccaagggtggggaaaattaaatcagcttagatactagttcatggggaatctttttgaactttagatgagaaagaaaaatcgtgttgacattcattcactctttctttttaaattgagatataattcacatactgtaaaattctccctttaaattctcactggtttttagtatatgcaaaaagttgctgaattaccatccctttctaattccagaacattttcttcaccctaaaaagaaactccatatctattagtaattgttttccattctaccctccccaaccctaaccctgccaaccactaatctactttctgtctctatggatttccctattctggacatttcatataagtggaatcatacaagatgtggttttctttttggcttctttcacttaacataatgttttcttttagttttttggggttttgttgttgttgttgttgttgttgttgttgagacagaattttgctctgtcacccaggctggagtgcagtggcgtgatcatggctcactgcagcctctgacctcccggtctcaagcaattttcccacctcagcctcctgagtagctgggatggcaggcgtgtgccaccatgcccggctaattttgttttcattttttgtagagacaaggtctcactctgttgtccaagctggtcttgaactcctgggttcaagcagtctgcccacctcagcctcccaaagtgcagggattacaagtgtgagccaccgcacctggcaacataatgttttcaaggtccatccatattgtagcaggtatcattactttatttttttttgtagatgaataatattccattgtgcattcattcttaggttaatcttttttagcatccctttacataaagtaccatagaaagtgctgtggccctagagagatggataaaacaaagcatctgctctcccgggataaaaagaagaaaggccattttgtgaagagatgaagactgagcggttgtggccgccttgccgaccttgagcagcagttggcttctccacatagtacccgggaataggagtctcagaatcgaatctcttctgcctgctcacttctgtgagatttttttgatcttcagctacatttttggctttgtgagaagcctcatcatccaacacagtggccagcaacgttgccgacaagacggatcctcactccatgaactcccgtgtgttcattgggaatctcaacactcttgtgctccagaaatctgatgtggaggcagtcttttcaaagtattgcaaaattgtgggctgctctgttcataagggctttgcctttgtttagtatgttaatgagagaaatgcccgggccgctgtaggtggagatgtacagctcctcttttgacttggaccatgactttcaacgggattattatgataggatgtacagttacccagcacatgttcctcctcctcctattgctcgggctgtagtgccctcgaaatgtcagcatgtatcaggaaacatgaaggggaaaaagtggcttcaattctaagagaggacagcggggatcttccaagtctggaaagttgaaaggagatgaccttcaggccattaagaaggaattgacccagataaaacaaaaagtggattctctcttagaaaacctagaagaaaattgaaaaggaacaggggaaacaagcagtagagatgaaggatgataagtcggaagaggagcagagcagtagttccatgaagaaagatgagactaatgtgaaggtggagtcggagcggggtgcagatgactttgctgaggaggacctactagatgatgatgacaatgaagatgggggatgaccagctggagttgatcaaggatgatgaaaaagaggctgaagaaggagaggatgacagagacagcaccaatggcgaagataactcttaagcacatagtggggtttagaaatcttatcccatcatttctttacgtaggtgcttgtctaagatcaaatttttcaccagatcctctcccatggtatcttcagcacatgctcactgttctcccaatccttgtccttcccatgttcattaattcatagtgccctgcgcctagttccattttcacctcctttgatgccctagtagttttgttaagtcttaccttgtaatttttgcttttaattttgatacttctttatgacttaataaaaaggatatgtggtttttattaactgtctccaaaataatcttttgttatgcagggagtacagttcttttcattcatacgtaagttcagtagttgcttccctaactgcaaaggcaatctcctttagttgagtagctcctgaaagcagctttgagttagaagtatgtgtattacacccccacattagtgtgctgtgtgaggcagttcaacacaaatgcaacaacgtagttttgtgaatgagagctggcatgtcaaatgcatcctctagaaaaataattagtgttgtagtcttaagatttgtttctaaagttgatactgtgggttatttttgtgaacagcctgatgtttgggaccttttttcctcaaaataaacaagtccttattaaaccaggaaaaaaacaaaaaaagaggaaaggggtagttgagaagaataatttctttaaaacactgcatctcagaaataatttgttagaatactattaaatatgaaaaggcaaacatctttctataattaaactgtcaacttgtcactgttttcttatagtgctgaaaaataagcgtggcaacaagtgtgttaggtcaacttgcagattgtttttatgtatatacatttcttacattttatgtgaggatgtttggatgagagaggcataatccatatgagaaaaaatatttctctggcacaataatggatttttaaacataggtgattattttaactgttccaatgtgaaaggatttatactttttatttaagaggtagaatatgtatatgcatatctatatataatatctatatctatgtcatatatatatatatagtctaacagacaaatgtgcgtaactaaggatgatccctcagaatgagcaaaatgcataaaggattgacatggaaaatctgttaaataagacattgaatattatgcaaggatttctataacatttttacttgttggtactaaaagtaatttccttttcaatacagaagcattttaattgtggaaattatttgatttcctttttgtggaattaattatatactgtgtatggagagcttgggtttttctcatctttttgacattaaacacatctcaccaaaaccatacacgaggattgttttgaagacttgccaacattccaaaaacctcttcagccccttcattgttcttaaccagatttcctgaaacttgactttaaagtttttattatgatttttaaaatagatatcaaattgatataaaatataatttaaactattagatcaattagtagcctttttattcaacagctattacaaataatttaaccttataatcacagaggtaaatacagatttgataaaaatctttacattttgaaattaatgaggtaaatacttaagacttgggagcagaggaaccgtctccagttcaacagaaccaaaggttgtgattacgattaggagtagcatctgatcttttaattgaatattattattattattattattattattgagatggggtcttgctatattgcctaggctggtcttgagctcttgggcttaagtgatcctcccaccttggcctccgtaagtgctgggattacaggcatgagccaccactcctggcctcagtattatttttattataccacaatgccctccaaattaactgcaagttgatgtattacaaatgctattcttctaatcaacctagtaacgatttactaaaaattttttagtgattttaattttatataaattaggcagactatttcaagcaggtaacagtggattattccactaaaccagttctaccctttttgttcatataatgaaaataaaaagagaagcttgattatttcagttcagaatacattaccctcaaataaatttaggccagagatgtagctacgcagctgtccagtgtcataaaaaagcaattcaccggtgagtgatctctccattcagaagtgtgcagtcttaatgtatggctgtaagaaactgttattttatgatctttttactaaaagcttgactgaaaactaaaataaattaataaattagaacagagaagtgatatagtcttattatgcatataggatgaaccactactagattgttagtctctaatacagtattcctcaaactttaacagacatagaattctccgggagtatttattaataaaatgtagatcctaaagtgattgtttgcctgagacggggcctgggaatgtaaacattaaactagtacccgtggttattcggatgcagaagagggaggaccaccctttgagaaacactgattaaggactccagttgtttttgatgattctgttctatttagaattagaggcactttggagacaaattgcatgagttcaaatcctagctcagctatttaccagctggtgaccctgggtgaaatacttaacctctctgtgctattcttatctgtaatatagtatagatatttcatggtaattaaagacataaaatacacttttactagaacctgacatatattaagagctattaaagtgttagctttgctcattgcaacctctgcctcccaggttcaagtgattttcttgcctcagcctcccaagtagctgggactgcaggtgcgtgccaccacacccagctatttttagtagagatggggtttcaccatgttggccaggatggtctcaatctcttgaccttgtcatctgcctgccttggcctcccaaagtgctaggataacaggcatgagccaccatgcccagccctgaaagtgttagcttttattagcatgactgtttctaggaaatctctcctttttgaatactcatgttataatcagctctcctttaacagataggaaatgaacctatatttgtcctaagctttaaaggatgctggtgaggaaatgctaaagatggtacatgttcaatatagtgttagggagataaattaagtttcaacaaaattgtttctcttcagtgaatatatttaagattatatgtataagatatatcttaggggcctgggcaagatggctgaacaggaacaattccattgtgcagctcccagcgagatcaatgcagaaggtgggtgatttctgcatttccaactgaggtacctggctcatctcattgggactggttagacagtgggtgcagcccacggagagcaagcagaagcagggtggggcgttgcctcacccgtgaagtgcaaggggtcggggaactccctcctctagccaagtgaatccatgagggactgtgccgtgagaaacggtgcattccggcccagatactatgcttttcccatggtctttgcaacctgcagaccaggagattccctcaggtgcctacaccacgagggccctaggtttcaagcacaaaactgggcagccatttgggcagacaccaagctagctgcaggagttttttttcatacttcagtggcacttggaatgccagcaagacagaaccatttgctcccctcgaaacagggctgaagccagggagccaagtggtctacctcagcggattccactgccacggaacccagcaaggtaaagatccactggcttcagattctcactgccagcacagcagtctgaagtcgacctgggatgctcaagcttggtcgggggaggggcgtccgccattactgaggcttgagtaggcggttttcccctcagtgtaaacaaagccgccaggaagttggaactgtgtggaacccaccatgtctcagcaaagccgctgtagccagactgcctctgtagattcctcttctctgggcagggcatctctgaaagaaaggcagcagccccagtcaggagcttatagataaaactcccatctccctgggacagagcacctgtgggaaggggcggctgtgggtgcagcttcagcagacagatgttcctgcctgccagctctgaagagagcagcaaatctcccagcatagcgctcaagctttgctaagggacagactgcctcctcaagggggtcgctgacccccatgcctcctgactgggagacacctcctagcaggggttgacagacacctcatacaggagatctatgactggtatctggtgggtgcccctctgggacaaagcttccagaggaaggaacaggcagcaatctttgctgtttggcagactctgctggtaatacccaagcaaacagggtctagagtggacctctagcaaactccagcagacctgcagcagaggggcgtgaatggtagaaggaaaactaacagaaaggaatagcatcaacatcaacataaaaggacacccacgcagaaaccccatctgaaggtcactaacatcaaagaccaaaggtagataaatccacaaagatgaggaaaaaccagtgcaaaaagcctgaaaattcccaaaaccagaacacctcttcttcaaaggatcacaactcctcgccagcaagggaacaaaactggatggagaatgaatttgatgaattgacagaagtaggcttcaaaaggtgggtaataacaaactcctccgagctaaaggagcatgttctaaccctttctattccttcaaattagctctggaaaggactacagaaagctggactgtaatttccctttgcttactcaggtcatctaaacctaaatagtctgagtatattgccttaatcagaatcacattttcccctctttaattccttcccccataataaaggaagctaagaaccttgaaaaaaggttagacaaattactaactagaatcaccagtttagagaagaacataaatgacctgatggagctgaaaaacacagctccagaactttgtgaagcatactcaagtatcaatagccagattgatcaagcggaagaaaggatatcagagattgaagatcaacttaaagaaataaagcgtgaagacaagaatagagaaaaaagaatgaaaaggaatgaacagtgtctccaagaaatatggggctatgtgaaaagaccaaacctacatctgattggtgtacctgaaagtgacggggagaatggaaccaagttggaaaacactcttcagaatattatccagaagaacttccccaacctagcaagacaggccaacattgaaattcaggaaatatagagcataccacaaagatattccttgagaagagcaacctcaagacacataatcgtcagattcaacaaggttgaaatgaaggaaaaaatgttaagggcagccagagagaaaggttgggttacccacaaaaggaagcccataagactaacagtggctctctctgcggaaaccctacaagccagaagagaatggggggccaatattcagcagtcttaaataaaagaattttcaacccagaattttatatacagccaaactaagcttcataagtgaaggagaaataaaatcctttagggacaagccaatgctgaaagattttgtcaccaccaggcttgccttacaagaactcctgaaggaagcactagacatggcaaggaaaaacttgcaccagccactgcaaaaacatagcaaattgtaaagaccattgacactatgaagaaactgcgtcaactaatgggcaaaataaccagctagcatcctaatgacaggatcaaattcacacataacaatattaaccttaaatgtacatgggttaaatgccccaattaaaagaaatagactagcaaataggataatgagtcaagacccatcggtgtgctgtattcaggagacccatctcacatgcaaaggcacagataggctcaaaataaagggatggaggaatgtttaccatgcaaatggaaagcaaaaaaagcatgggatgcaatcctagtctctgataaaacagactaaaccaacaaagataaaaaaagacaaagaaggttattacgtaatggtaaagggatcaatgcgacaagaagagctaactatcctaaatatatatgcacccaatacaggagcgtccagattcataaaacaagttcttagagacctacaaagagacttagactcccacacaataatagtgggagactttaactccccactgtcaatattagacagaacaatgagacagaaaattaacaaggataatcaggacttgaactcagctgtggaccaagcaggcctaatagacatctacagaactctccaccccaaatcaacagagtatacattcttcttagcaccacatcacacttattctaaaattgaccatataattggaagtaaaacactcctcagcaaatgcaaaagaacagaaatcataataaacagtctctcagaccacagtgcaatcaaactagaactcaggattaacaaactcactcaaaacggcacaactacatggaaactgaacaacctgctcctgagtgactactcggtaaataatgaaattaagacagacataaataagtgctttgaaaccaatgagaacaaagacacaacgtaccagaatttctgggacacatttaaagcagtgtgtagagggaaatttctaacactaaatgcccgcaggagaaagcaggaaagatctaaaattggcaccctaacatctcaattaaaagaactagagaagcaagagcaaacaaattcaaaagctagcggaagacaagaaataactaagatcagagcagaactgaaggagatagagacacacaaaacccttaaaaaaatcaatgaatgcaggagctggttttctgaaaagatcaacaaaatggatagaccactagctagactaataaagaagaaaagagagaagaatctaatagacataataaaaaatgataaaggggacatcaccactgatttcacaaaaatacaaaccaccatcagagaatactataaacacctctacacaaattaactacaaaatctagaagaaatggataaattcctggacacatacaccctcccaagactaaaccaggaagaggtcgaatccctgaatagatcaataacaagttctgaaattgaggcagtaattaatagcctaccaaccaaaaaaagcccaggaccagacaaattcacaggcgaattctaccagaggtacaaagaggagctgctgctattccttctgaaactattccaaagaatagaaaaagagagactgctcccttactcattttatgaagccagcatcatcctgatacgaaaacctggcagagacacaacaaaaaaaagaaaatttcaggccagtatccgtgatgatcatcagtgtaaaaatcctcaataaaatactggcaaaccgaatccagcagcacatgaaaaagcttatctacctcaatcaagtcagcttcatccctggggtgcaaggctggttcaacatatgcaaatcagtaaacatgatccatcacataaacagaaccaataacaaaaaccatgtgattatctcaaaagatgcagaaaaggccttcagtaaaattcaacgccccttcatgctagaaactctcaataaactatctattgatgaaacatatctcaaaatagtaagggctatttatgacaaacccacagccaatatcatactgtatgggcaaaagctggaagcattccctttgtaaaccagcacaagacaaggatgccctctctcaccactccgattcaacacactactggaagttctggccagggcaatcaggcaagagagagaaataaagcatattcaaataggaagggaggaagtcaaattgtctctgtttgcagatgacaagattgtatatttagaaaactccatcatctcagcccaaaatctccttaagctgataagcaacttcagcaaagtctcagggtacaaaatcaatgtgcaaaaatcacaagcattcctatatgccaataatagccaaatcgtgagtgaactcccattcacaactgctataaagagaataagatacttaggaatacaacttacaagaggtttgaaggactttttcaaggagaactacaaaccactgctcaaggaaataaggacacaaacaaatggcaaaacattccatgcttatggataggaagaatcaatattgtgaaaaagaccatactgcccaaagtaatttatagattcagtgctatccccatcaagctaccaatgactttcttcacagaattagaaaaaactactttaaatttcatatggaacctaaaaagagcccatatagccaagacagtcctaagcaaaaagaacaaagctggaggcatcacgctacctgacttcaaactatattacaaggctacagtaaccaaaacagcatggtactggtaccaaaacagatatatagaccaatggaacaaaacagaggcctaataaataacaccacacatctacagccatctgatctttgacagacctgacagaaacaagcaatggggaaaggattccctatttaataaatggtggtgggaaaactggctagccatatgcagaaaactgaaactggacctcttccttacaccttatacaaaaattaattcaagatggattaaagacttaaacataagacctaaaaccataaaaaccctagaagaaaacctaggcagtaccattcaggacataggcatgggcaaagacctcatgactaaaacaccaaaagcaatggcaacaaaagtcaaaatagacaaatgggatctaattaaactaaagagcttctgcacagcaaaagaaactatcatcagatgaacaggcaacctacagaatgggagaaaatttttgcaatctatccatctgacaaagggctaatatctagaatctgtgaggaacttaaacaaatttacaagaaaaaaacaaccccatcaaaaagcgggcaaaggggccgggtgcagtggctcacgcctgtaatcccagcactttgggctttgggaggccaaggcaggtggatcacgaggtcaggagatggagagcgtcctggctaacacagtgaaaccccgtctctactaaaatgtacaaaaaaaaaaaaaaattagccgggcatggtggtgggcacctgtagtcccagctactttggaggctgaggcaggagaatggcctgaacccagaaggcagagcttgcagtgagccgagattgcaccactgcactccagcctgggggacagaccgagactccgtctcaaaaaaaaaaaaaaataaaataaataaaaaataaaaaaaaattgggcaaaggatatcaacagacacttctcaaacgaagacatttatgtggccaacaaagatctgaaaaaaggctcatcatcactgctcattagagaaatacaaatcaaaaccacaatgagataccatctcatgccagttagaatggcgatcattagaaagtcaggaaacaacagatgctgaagaggatgtagagatataggaatgcttttacactgttggtgggaatataaatcaaccattgtagaagacattgtggtgattcctcaaggatctagaaccagaaataccatttgacccagcaatccctttactgggtatatacccaaaggattataaatcattctgctataaagacacatgcacacgtatatttattgcagcactattcacaatagcaaagacttggaaccaccccaaatgcccatcaatgattgactggataaagaaaatgtggtacatacacaccatggaataatatgcagccatgtgtattatgactagttcatgtcctttgcagggacatggatgaagctggaaaccatcattctcagcaaactaacacaggaataggaaatcaaacacctcatgttctcactcataagtgggagttgaacaatgagaacacttggccacagggaagggaatatcacacaccggggcctgtcggggggtgggggataggggagggatagcgttaggagaaatacctaatgtagatgatgggttgatgggtgcagcaaaccaccatggcatgtgtgtacctatgtaacaaacctgcacgttctgcatatgtatcccagaacttaatgtgtaattgaaaaaaaaaaggaaaaaaaaagtatgcctgaacatgtatgtgtatgcagcagacaagaggaggtaaatacctatggctgataagatggcatcaaactacataccaaattgttacttcacttctgtttctctggcttacttcagaattaccttgcataggatgaaagatttaatggaacaggaaagggtatttgtgttcagcctcagcttttaggatgggagtagccaatgggtataatctgggcaatcctgcatgtgcagactgggaaacccaagtcttatatctcatataccatagtaatttttacagttccacagatgaaaatgaaatgaaatcaattccatcattttcagaaaagatatcttttaagaaatctattattattattataagagcaaaataaaacaggatcactcttttatataattacaaaatatttttaaatatgtgcatgacaaatgctgtgtaatacacctcattattttcagtgtccctgatgggctccttatccttgacctaaaaatggtgattccaaatttaagactttcttgggtatattttttaattggaataaatacagaggtcaaaattactcttgggtttctaagtaagaagaaatgcaattacttgtgaattattttaagctcgaatgctatttgctctctgttaaaatggtaaaacaaattactcgttatggaatatatacccacaaaagtctttcagtaaaatgttattgctaaaatgtatcttaaaatctaattgttagtctttgttacacttgtcagctcagaatggtcaggaacctttttttgtgataagcctcacagaggctatggaaaacaggagcacttttttcttgggaatataattgcagtaatactgtaccacctaatggagtcagaaaaaacaatttatgtagaaatatagttctgagagccttgcgattattgccttttgtgtcattctacctacattacacaaagtaggacttaggaagtcctggaaatcatatgttggatattttctaattactgtgtcagcatgatcaatcattttctaaatttgccagtttcctgaaatagcttagcttatgttcatagcactttagaggaagcagcataaaattagtttctattggtgtcacaaaagaaatgaaatatttatctttggcaaaaagacctgtacaccaaacttcaattaatgagtacaagaattagaaatcaaaactttgtttagtctaaggaaaaacagttctttaaactgtaaccacatggctgtttcttgtttgcatcaactctgggtgactgttattgtcttctgtgaattctctggggcaggggcctgactttgttgaatgagccaattgttttcatttgtgttgcccatctagtaagttcccatctggtttgtatcagactgttttcacagccaacaactgctgccttctctatatcctgacacttcagggccccacgctatcaaagcactgctgcgatggccttgctggcagggcctatacagctgtgccttacagcttggaactattacccagagtaatggtaacgtagaacttggactggcccttattcccactggtgtcgtgtgtacagtgagcagaaacccaccctctccctctctcccccttgccccgaaacttgctattcaacagaaaatctttaaagctcttattttaggatgtggaatggtggtgtttttattttctagtggcttcctgtatttgaaagctcatttttcattctttcactctttcaaaagttaccaggtctggccttagggaagtgaactggtcactatgtcacatttaatttttgtttccatatttagttaggaatggctagagatgtcaaaacccactgtcaaggctacacagataatacagtatatttttagtgataaccacaagccataatttgagagaagtcttcatatttaggaagggtttccatctcagaaaatagattttctgtgtatagatacagaggcacttagcttcaaactgcttagtaaatattagggagttactttgccatcagctttggtaattatcaaatgtcatttataagaatgttataatagtgaccttctctaacagtctgtggcctggtataatataggtgtattagaattatgggtgttattattgacaaagatatggttgagtttaagtgtagttatgatattattgcttaatagacataaactgaaacagcaaacttctttcctaccaaagaaaggaattaaatgtgaatttacaatgtattaagattttttaaatgctgaagattagttaaaactggattatagtttgtgctttcaattaaatcaagtggctgattgtcgtagagcacgaagtatcctagatagtaagccctgtgagagttaaactacagcaacaacaaaatctcaccttctgcttctgaataatttcagtgcactggtatttcaaggttttaggaaaaaaaaatagaaaggaattcatctttgtagtcagcagtacggcctatgacttagtgtaactatttatttgatattaaaggttacctagtaatgccagtaatttggcttaattttatcattggaaaaaagtttaaaactacaaaggtatcatcttttaattgctgaaactgccctattggtttcttccattttaacttttttatggaagaataatatacattcagaaaagtacacatattgtaagtgtacagctcaaagaattttcacaaatacagtacacttgtggaagcagtatccagctcaagaaattgaacactgccagacccccaaaggccctcatgctccctttcagccacagtctctactcccacaagcataaagccactactctgacttccaacaacctagattagtttccttgtttgcacttcacataaatgaaatcatacggtatgtatggcttctttcaccaggcaaacctattgtagtttttaagattcttttagtttttaaactattatggcatgcttttataaagaatgatctgagaggaatttgttttagtagctgtttcacaggctgttcaactaacaggaagtgagttgtagataaagttgtctattaaaacatagagtctctcagttctcaaccaaattttaatgctggaatgtccctctagacattcttgcccctaaaaggcaggcactctctctgtcataacaccaacaggaatacagtcaagtacttaaatgctttttaataagctttaataattgaatgtacattactcaagttaattgtgatttgcattcaggataggtgggtcatctattttctgaattaactatcaacttcttggcagtgggatatatacttttatgccgccaggatcctatttctgaaaatgctattatttaagagagttggtatacctactagagccaatgagtaacttaatttggaggatctggccaggttatttaacaagtactaacttctttttatatatttttaagtaccctaataatttattggatttttttttttttttttagtgaactcaaattagtataaaaatgtagctatcctgactgttactaattttagatgtctccttattgagttttgttttaaattctgtacatcgtccctttaaaaatttatgttgttttgtgggttaaaaaattcacattttggggggcttcatctttatatccttattttgcagttaacagccttatagttttatgctgttttcttagataatccataaagaatttgtttaaaataatactataaagatttacaaatgtaagtattactataccagtgactcttactgaaaatagcattgaagagtcagaaagtaagctttgaagcccaaaataatttttttttaaatatgagtataactgttataaagcccaaatttcaattttttaaaaataccaatttttataaatgtcattttattttagatttgggggtacatgtgcatgtttattgcatggatatattggtttattgcatggatatattggtatattgcttaattgtggggattgggcttctaatgtacccattacccaaatagttaacattgtacttgataggttatttttcaaccctgcccccccttcgctggcttttggagttttcatcgtgtattatttctatccgtatgtccatgtgtacccattgtttagctcccacttataagtgagaatatgtggtaatgaatttcctgcttctgagttagttcacttaggttagtggcctatgagctccatctatgttgctggaaaggacatgatttcattcttttttatggctgtgtagtattccttgaaaaataccaatttttgaaaaggatgtacactaactataacatggtttactttcacttggcaccagagatagcaacaatattttgaacgactatttgaaatgaaaagctaaaatattgaaataaggggggtatttggaaaaggcacagtgtgtacaagtagtgcaatcccagtactccctgtgtgccttcaattaaagctttttcagccagtatccctgcttttccaggctggaattctatttccaaatctaagttcacttgttctttattttgtagtatcttcaaacatttaagtaaaagctaacaagtcagctttttgtggtaaagataaaaatataaattatatttatagttaatatataactcaatttctagtcagcattgctcattcaaaatttccatagaaatgttaatagaactttatagatcaaataattccaaaattttccttctcatcttttgacttcaataccagtattatgtttttttttcagttttgatcagcaggataaagaattgtaagaactgacaaacttgagaagcagttttcaagttgtgttgacctagttgtaggccgtgtttgctgttttaatcatcaactgcagagcacaatactcacccttccagtaaacctcgtaaatcaacaagtgagaattatgaagccacttacttgttataagaataaaagtggtcaactctgatactgtgatagtggcttattttttttaactgttaagacgtatcactgcagaagtcaagatcctcccccagttttgactgaggagagttttatgtttacaataacagcaacaaccatatgtcatagtaaccatttatgtacccttcctttaggtggcatactctgctaagatccttgatcaactcaattagggagttaatattctcattacttgctataaacaagtggttcttcaatggaagggatctctgaggtggtattgatacctttgttttcatgtttatactctgtgttctctgtagaatttgaaagggagctctattaaactggagggaccaagcagtaataatttctgtccctctctaactcttggaagtttagaaacaaagtgagaagtgaacacagataacatttaaacattaacatcatagtaagcacttttcttttttttttgagacggagactcgctctgtcacccacgctggagtgcagtggcgtgatcttggctcactgcaagatcagcctcccaggttcacgccattctcctgcctcagcctcccgagtagctgggactacaggtgcctgccaccacgcccggctaattttttgtatttttagtagagatggggtttcaccgtgttagccaggatggtctcgatctcctgacctcctgatcttcccaccttggcctcccaaagtgctgggattacaggcgtgagccaccgcgcctggcccatagtaagcacttttaatacatttaaagattttttaaaattgtatcacagttgagctgggcatggtgacagacacctgtagttctagctactaggaaggctgaggtggcaggatggcaggatcccttgagcccagaaggtcgaggctgcagtgagctatgattgtaccactgcactccagcctgggtgacagaatgagaccccatttctttaaaaaacaaacaaacaaaacctatatcacagttgtatgttcaattttggtctatttgtggatatcaaatatatgtaacttgtatttgtccacactcttgtccttataaaacattaaattttctacagtataacaataatagtttaacatgaatgtttatctccagtgagaatgtattgcccagcataatgaaatatggaatgcttataaacttgctcatttaaatatcttcttataaaaatccacccaaaaatttttttaatttttagtataaattttttttaatttttaatttttgtgagtacacagtaggtatatgtatttacgggttacatgagatattttgatacaggcatgcagtgtgtaataatcacatcagggtaaatggagtatgcatctcctttgtgttacaaacaatccaattatactcagttattttaaaatgtgcaattaaattattttttactatagtcaccctgttgtgctagcaaattactgggcctaattcattctttctattttttttttttttttaacccattaaccattcccacttcccttccgctctcactaccattcccagcctgtggtaaccatccttctactgcctatctccatgagttcaattgttttttcttttcttttccagcctggctctgtcgtccaggctggtaggcagtggcaccatcttggctcactgcaacctctgcctcctggactcaagccatcctcccacctgagcctcccaagtagctgggtctacgggcgcgagccaccacacctggctactttttgtattttttgtagagactaggtctagccattttgcccaggctggtcttgaactcctaagctcaagtgatccacctgtctcaaactcccgaagtgcttggattacaggcatgaaccacctcacccagactgtttttattttttagttcccacaaataaatgagaaccttcaaagtttgtctttctgtgtctggtttatttcacttaatgacctccagttctatccatatcattgcataagacaggatctcatccttttttatggctggataacactccattgtgtacatgtactacctgaaatttttgtgaaataaatgaagcttaagagataactgatttttatcttaaagaaaattagaaaagaaatactgattatacaacgttctaatttttttcatatcaccctaccccaagaatttgtttgaaataagttatagaaggttgttaattgactgtacttcacagcacagattaacagcatcataacggagccatgcccttagtatccagagtgtcttgttggcctgagacctatatgtgctataggtttctctcagttaactttccgattctctggccataaaaaagattttttcctcagcctattttatctcaatactaaaaatttgctttgctataatagtgtattgctcttctgtgctccctgccagctttatgggttgtttcctacggattgtattgagtaatatgctccaggctggcctaggaagaagggagattctaaacctctttttgtaattattaaattcttaggtaagagaatctgtgaaaacttttcacctttgaagaaatggcccattaatttcctttatttgatacaaatttcagattttctcatgaccctttgcttcccccccccatctgtgatgcataaagataataatccgttaaagtatttcctattgatagtcattaaaattcagctgtttaacttccttctttacattcaggccactagatcaaacttctgtttacctggttttatgagaataacggtgggagtgcatttggtttgtgttcttttagtgaataggaatgaatcatgattatttctatgcttaactgattttcttctgaaaaaataaatttttatgtagtttcaccaggtgatatggatcggacacaaattgagcttaatccgtacctcacatgtgtattttcaggtaagatttttactttaaaagttcttgaacttggagctgttcagattttttcatttcctgatgattctttctctcataataatcaacacagtagaaatactaatagcaatttttaattcttctgtaatatctgtaaattcaccccaggttacaaactcagctctccaaaaggcgtaagttaggggacaggaaagaaaacctatcgtttcgctttggaaagtttataaaatgatgaattaaaaggctgcaggtgtggtattcagagcactaaggataagactcgagataattccatctgggggaggttatttgttgggacaggacagtgtttaaactttgaagtcattttaaacaaagtgaagcagctggaacctggcataaaaagaaacagatctttcacattaacgattgctttttagaggaaaaaattggagttgtttttacaggtgtcggaacatttattcttcctataagaactgctttgtttttaccttaaattataaattttaaaataagcatttgtcaactcatttgaaaaataaaaaaagtaataggattcatatgcctaaaagatattttgggataagatcattgtaacattttaagttaccctttctaaaacatgagtaaggaaagaaatgtttaatagtgactaattctggaaagcaaaagtaaataaaatattgcatactatacttaacatcaaatgatgaggcaccttcttcatcaagtctttcatttattctcaaacactggggctatgatgttgcaaatctgtaggactgggttaagtatgtgaggagaattgaatacagcaggatagtttagcagctgcttacacaggaattggagcaagagtggatgagtccagggtgtacaggaaaaatgcttcaagaactcaataaaacacagctgaaatactgtaacattttcacagacagctgggaagcaactgcattgctggaactcagggctgattttaaagacaagatctggtcagtgtgaatctaagcaagctgttagcaaagagaaaccacagactctctaggtaggaacaaatcaatttggttcagcagtcatttcaaggtccactgtttgcccagcatcatgctgaggctttgtagaatgcagaggtaaataagacacagtcactgtcctagtggagcacatctttaatggaaacaacagacttacaagttagtaacaataatacaaggtgataaggtcacagatacttactgtgtacctgctatcctagtcactcagaacacaaagactgtcaattccaaagactgtccatgcccttaaggaatgcattgtctggaagaaatgacagatacataaataattacagtgcagtctggtaagtgctgcaatcagaataagacagccacaattaacaggagaggaactaatatttcaccactatcactggaaaaacaattcagagaattgaatcctaccattcgttacataacttattactcagaataaattatagtttttcttttacttagttttataaatctgacatccaaaaacagaaaacataaaatttctttatgaattttaaatatttttaaagcaaaaaattggaatttcaaatgtcaaaaacgtgtattaaattatgtctcaggaagcttctaacgcatggtctgactccatggcatgccccacttaaatgcatgccaggttaaatgacacactgcaaacccatggaatcaaggaatagtcttttttatagacctgaaaacagctgttgaaacaattacatcatagagtaatgacttgactgtgcaaatttaaaaagtcaaactttaaaagcatcaaactatatttaatagaggtagaagatttatatttgctttcatggtgatttattaaaatgttatgtcttttctttaaaaaaattaatttttttatgaatgttacccttttcgcctgttcacagtaatctaagtgatgctttttttaatgttcccagtctaaagagttctcttacaaagttctaaaactgtgatttagcttgtgtaaatgaatactttaaataaaaagttttcagccgggcgcagtggctcacgcctgtaatcccagcactttgagaggccgaggtgggcagatcacggggtcaggagtttgacatcagcctgaccaacatggtgaaaccccgtctctactaaaaatacaataattagctgggtgcggtggcacacgccagtaatccaagctactcaggaggctgaggcaggagaatcgcttgatcccgggaggtggaggttgcagtgagccaagatcatgccattgcactccagcctgggtgacagagcgatactccgtctcaaaaaaaaaaaaaattcccaaaatatacattaacaaataccttttgataagatggtacattttattgctataacttcttgattaaaacacagttaactagagtttaaactagcataactatttagaggccttccagagtgtactctctctttccccactccctctttttttcttaattgtatttcagtgaaacattcttattcctccttctaaagcagagtaccttttgcagcccaccctgagcctcattgcctcttagatagtggctttccaattacataaaagtaagagctgatatgtttgtgtgctttctatgttccagcactatataaaacactttgtatgtattatctggctgaatcctcataaaaacctctgaagtcagccgggcgtggtggctcacacctgtaatcccagcactttgggaggccgaggcaggtggatcacgagatcaggagattgagaccatggtgaaaccccgtctctactaaaaatacaaaaattagccgggcgtggtggcgggcgcctttagtccctcgcagctacttgggaggctgaggcaggagaatggcgtgaactcaggagatggagcttgcagtgagccaagattgcgccactgcactccagcctgggtgacaaaacgagattacgtctcaaaaaaaaaaaaaaaagaaaagaaacacctctgaagttggtactcatattttttttatagttgagaaaactggggttcagagaagttacgtaactttttcagtctcttattattttctatccctcttaccttttacctatttttctttatagtacttagcacttcctgttatattagatgtttatttccttacttgtcattcatcccctaaacccaacagaatgtgtggccagtgaggttagaccctttgttttcttcactgctgtattctccagagtctagaacagtgccaggcacatagtaggtgcacagttgatatctgttggatggatggatgagctcagctctgccctgttccagaatccattctcttatcccctctgccttttactccttcccatacagaagcctcacatcagcagtctgggtggggccattcctaagtgacctgatttggaccctactcttgatctgtcatgaagagacttgtgcttaaaatttcatcaccgctcccaagtttgttggtgttcttattactgcctagtcagtcaaccaaatctgtcatttcagagtgaaacttggttctttataagtactaagtctccatccaaaatatcttgaccctatttccactgccaaggatcattagttcttctatggactatttttatagatccgtctcccgtctctctattttccacacagctattaggatgatttttacctcttttttttttaacttttattttaggtttgggggtacatgtgaagaaggtttcctgtataggtaaactcgggctgtggaggtttgtcatacagattatttcatcacccaggtattaagcctagtacccaatagttattttttctgctcctcttcttcctctcaccctccagtctcaagtagatcccagtgtttgttgtttccttctttgtgttcatgagttatcatcatttagttcccacttataagtgagaacatgcagtatttggttttctgttcctgcattagtttgcaaaggatgatagcttccagtttcatccatgttcctgcaaaagacatgatcttgttcttttttatggctgcatggtattccttggtatacatgtaccacagtttctttatccaatttgtcatccatgggcatttaggttgattccatacccttcctgttgtgaattgtgccgcagtgaacatttgcatatatgtgtctttatggtagactgatttatattcctctgggtataaacccagtaatggaattgctgggtcgaatggtagttctgcttttagcttctttgaggaatcattatattactttccataatgattgaactaatttaccctcctaccaagtgaataagtgttcccttttctctgcaacctcaccagcatctgttattttttggccttttaataatagccattctgactggtgtgagatggtatctcattgtgattttgatttgcatttctctaatgagcagtgatattgagcttttattcatatacttgctggcctcatgtatgtgttcttttgaaaagtgttcatgtcctttggggttgtttttctctaatacatttgttttaagttccttatagatgctggatattagaccgtagatttgctcaaattattcctgtggtcaaaattttttgtgactccttactgctttcacaggacttggccctggccttgcttatctcaccatttctcctatccaaacaatatttgatatcagaatactcagagttcccttaacacattaactttatcttgactttattttgttattctgttttccttcattgccttcccaccatcttttcagtcccaactcaatggctaccttccacttcatttaagtattcctatacatgtttatctcctctactaggtgatgaacttcttgaggatgaggactctgtcttcttcatctgcatatgctcttagctccatacatgcagaagattcatatagatgtttagttagtgcatatatgcttttggagaagcccactttaatgtctctgggcctcagttgccttgtctgtttctgagaattactgttaggatcagataatatgatgaaaacgtatttacaaaatttgaattgttatacaaatataaggcaataactgcaagaaatgcttacagtgattgaattcagtatgttccttgagacttggaaacttctaggagatccctccaccctaaaaagttatagctcttattacaacattgagcaatttaatctgtaattttatgcacaaagtagaaaacgaaggtatatacaaagtggttttgtgaaattaaataacagagaaaagaagagtatttggtatcactgttgtttttggcagatgcataactcaaggaatggattagaaggtaacattaagttgtttgtatgagtggaaaattaatttgccctaggacttagttatatccagtgttagtttttactttattcatgaggtgagctctgatattggctgcttccctcagttattttgtgtattctgcatcatggctttgtaaaatataagaatgtttaaatattatatattattaatgcttgtgtcctatacacatttttaaggccaggcatggtggctcacatctgtaatgtcagcactttgggaggctgaagaaggaggatcacttgagaccaaggagtttgagacaaaggagtttgagaccagccccggcatcatagggagaccctccctctacaaaaaatttttaaaaattagccaggcatggtggtacatacctgtggtcctaactacttgggaggctgaggtggaaggatcgcttgagcctgtgaggttgaggctgcagtgagccatgatcatgccactgcactccagcctaggtgacagagcaagaccctgtctcaaaaaaaagatttaaaaaatacagtctttagtgtctattcattgcatttttattacatcctgacaaactgaaaagactaaaatcttttcctatttgaaatattctatttaaattcacataaaacttgttttctttttaaatactatggtattatattatagtttgtgatattgctgtaatgataccaaatcttatcttcctctctctttttataaaaaaatgaaatagtaacaaaaaggagtgatacagtatttaaaatagtctttattaaatttccttatatgaaaggaattttccttttacaagtattctgagcttggacagctatgattgagacatcattaaaatctccagaactgtctaattatactgtggcccctataaaaatttaatgaaaaattctatgttattactgtagaaactacttgaaaaacataaagggattttagaaaaattactgtgactcttgtctgaaatatgtctttaagattgtttaaggtaatttatttttaacgtatttattattcttatgtctatggtaaatccatgaaattttaaatgaggatttttgtttgtttgttttaaataataccaagttgacagtctttatattcttaggcattgtgctttaaacttacaggggtgaatttgggtataggcagatacatacacttacgtagtcaactttgaattttttacatattaatgaattatttatcccaaactgcctgccctctgccaccagccagctttcatattagacattataatattgctctcaatccatgaagtgggaattttttttcatatttcattaaatgtagagataatgtctactttacagtagagagaaaagtctattttacagagaaaaatgctttccaaagtcaagtgtcagtaatacttggatgaccactgcagtatgtttttcctctgacattgctaaccttatatcacttctgttggctaatagcatagcacccttaggcactcagtaaatcattattaatgacatgctcttgagtttaagagtccattttttaggaataggaggaagagcaaagtgccttggcaacctttgacttcaaatgccttttacatggctgatatcttacctcttttaaaaaaaaaaaaaaaagttcttgctctaaccacaaacctttaatttctggctattatagtgttttattgctctcctagctatttacttaatggtaacagtagtaataatggctatcttttaatggtaatgggagcgcttagtttttgaccacttactgagtgctaagctctgttgttgagctcttcactgacactattttatcctcactatactgtgcaaagtaggtactattatcccatttaacatatgggaaactgaacttttgagtggtaaaataacttggtgacagtcacacagccagcaagaagttaagtctggatttcagagactaggcccttaacccgttacatttgatcttacttagcatttatcatctgtatcacaacttttagcttgtatactgatgttgtctctgactgattaggagtgagggtggaaaggaggaaggtgtattttacctctctgacaagttctgagcaccttgggacaagagagtcccttgtaggcaatccttatttggaatccgcgcccccccaccccaacctcatattatttcgcaaagcataaagcacgtaaatactcaggttacgcatgttgagctgaatgagcttctcctttgtgcaggtgggaaagcagtgccactctccgcttcacagatgccccctgccaagatgtcagtgatgctgccgtcagtgaacctcgaggactgctctcagtctctgagtctcagcacaatgcaggaggacatggagtcttcgggggcagataccttctgaacgggaagagacagccagcacagtgtttatgccactggttttaaagtcattttaccttggcttaaaaccctctctcagactgtttggtttttgagcatattctgaaaaaaaaattccaatattttaaaataaaacaaaaagcataatttgggtatttaaagtttttaaataaaataagtataagtcattataagtctgattgtgagttgtttcttagaatcctgagatagcatagagtagtgaaagggcatggcttttgacatctaggcatttaatctataggtgtaattatctgtatgtatttataaaattatgtagctcaaggttattcattctaacatttttataacagcaaatagaaaaaatcaaatgtctatcaataatagactggttttaaagtgatggtacatcagtacaatggaatactatgtattacaaaaaaaaatttaaaaagtttattgatatggaataatctttgagatgcactgttaaagtgaaaaaagccatgtgcaaaatagtgtgtgaactatgcagttgttgaaattatttaaaatggggtggggaggaattcaaatgtatggtatgtcacatattcttacatgtatttgcttgtaaatatattatataaacaagaaactgctaagtttgtctccagggagtagaattgttggctgggtgataggagaggctaagtgataggaatcaaggataatcgtggttactatgtatttgaacttcagttgtgatagaaaaaaatcatcagtgagattaatttttatatgccttatgtataccatataaacctttataaacctgtgaaacatgtaactctattaccttttgcaacataaatacataaaattaaaggaaaataaaaagcattgcttcgtaatcagatacatgtaggttctaatcccaattctgtaacttcttgctttgtgataggggccaacgaaacgccttcttatcagctgtttcagattaatgggtttaatacttatttttgcagaataatggacatcagtgattgtgtgtggagatgggggtgggtagtgcccagcacagtgcttgataccatgtaagtgctcaataaatggtgttgttcttattatcttgagggatttcagtactgtatagtagagggcataagcacatgaaaagaaaggcagcctagcactagtgaaaaaaatttacctcccagaaaaatcattttctgtcacaactgaatttcaaacacacagtaattacagtcatccttgactttttcagcatttttgtaggttgctaagtggatctcagcactggcagcacattagaacctctgggagctttaaaaaatactaatgcctgggccttgtaccaagggatttcaatttaattgatcttggatggggtccagcattggtattaaaaaaaaaaaaagaccttttcaggtaattttaatgggcactcaaggctgagaattactgaagagcaatttagaattccttaaacttctagtaggagccattgcctggggattttttttctcactgaacatagaagctgcaagagtctatggaaactcagaaatgtgtcagccttccacatgcacttcctcacagcttctctcaggtatttggttactggaatgttttaggtttcactttagaacccgttttctttgatatggccctttggacagttctgcttataacagtttcctttaaacaagtggaagaaaaattctgctctgtggattttaatttgtttttgatattcatctacaagactctgggcaaggtgaaagctggagaaatgttgcttagtgctgcttcattttaaacatgacaccccaccccccaaccttggtttctggttttcatagttttttctgccttggaaggatttcagcaaaatcttgttttagttaaagcattttttatttaaaggtgttggtagatttttcctcctaaccatagaaagcctgccttttctaactttagggtagaagtgtaatctttgatttattctactccctgtgcacgtgagcttttcttttaaaaaaaattagtgtccattcgacggtttcttttttttttttttgagatggaattttgctcgttgcccaggctggagtgcaatggcacaatcttggctcaccgcaacctctgcctcctggtttcaagcgattctcctgccttagcctccttagtagctgggattacaggcgtgcgccaccatgcccggcaaattttgtatttttagtagagatggggtttctccgtgttggtcaggctagtcctgaactcccgacctcaggtgatctgcctgcctcagcctcccaaagtgctgggattacaggcgtgagccaccgcgcccggcattcatctagtattttgttttataggattatttctgttcatggttactcctgtacacattcctctgccaaccacttcagattcttttggaataagacgatgtacgtaaaaacaaactaaatggaacttttgattttataagctttaaaatttttattttatattaaattttacaatttccaacttccggaataaactatttatgagacatgctattaagagactatcaagatcaaggctgttactattgctgggctgtgactggacacggtggctcatgcctgtaatcccaagactttgggaggccgagggtggatcacttgagctcaggagtttgagaccagcctgggcaacatggcaaaacccatctctaccaaaaatacaaaaaattagctggtcatggttgcacacacctgtagccccagctactcaagagggtgaggtgagaggatcgcttgagcccaggatgtcaagactgcagtgagccgtggttgtgccactgcactccagcctgggtgacagaatgagaccgtgtctcaaaaaaaaaaaaaaaaaaattgctgagctatcatgccttaacactaggtaacgtgtttaaaatgttcctttctgctgggtgcgggtggctcacacctgtaatcccagcactttgggaggctgaggcaggcagatcacccaaggttaggagttcaagaccagtctggccaacatggtgaaaccccatctctactaaaaatacaaaaattagccaggcatggtggcgtgtgcctgtaatcccagctacttgggaggctgaggcaggagaattgcttcaacccaggaggcagaggtggcaacgagctgagactgcaccacttaactccagcctgggcaacagagtaagactctgtctcaaaaataaataaataaataaataaaatgttcctctgttttaaatcctaaattcgttctttgtatactttaatagaatcttgaataaatatttttattcttagaagattatttcaatatgtttcttattgcttacagatttctggttccttgataactttaaaatgctaaacatatatcttaagatcttttattgtttttctattaactcaaaacattttaaaaataagtaaagtagcatttttaagttcatagtgtattaccacccccaatcaaaaagtaattctgtaactggcagggcgcagtggttcacacctgtaatcccagcactttgggaggccgaggcaggtgggtcatctgaagtcaggagttcgagaccagtctggccaacatggtgaaaccccgtctctaccaaaaatacaaaaattagccagatgtggtggcgtgtgcctgtagtcccagctacttgggaggctgactgagacaggagaattgcttgaacccaggaggcggaggttgcagtgagctgagattgcgccactgcactccggcctgggtgacagagtgagactgtctcaaaaaaaaaaaattattattatataattgaaatatacttatcttttaaaagatgtcctgatgctgtggtatttccttatatgtgagtaacttgaacaataatggagagtacagtccttaatatttctgcgatgttactaagagaaaactcactgaagcattcttttctatcatatatccatatgtgcatctgtttaacaaacatgaagtatgaaggacatggggtgtacagtgtggcgtggatcctcagggggaggctgggcagtcacctcaggatttgtcattcctgcttttggtcatatgcctctcctggaggacagagattaaccataagaaattctgtctccccctaatatggaatcctcatttgatcattaaacatcagttgcacagtagtttttgaagactctattagaaatgcactagagaaaagccaattttctaatgagaaatctgatcattattgttcagggaatttcatgaaggcagtgtttttatttgacctaggtaggagaatgaggggtagattttaagtgtcagactgtcaaatctttgagaatcatcagcctgtgtctgtattctttttaaaataattttttcttcttgtcctgaagtgtttacctggaaacaataggaaatattagccagagtacagatgcccccttatgaggcctgtaaatattgtaaagctatttgatggtcctctaattaccaagacagcaagcaaatcagagctctttttctgggtctttatagtatgaatggtgacatttataatttcagccatagtgaggaataagttattgatacatctctggaattcagggacccctaaccaaagttaaaaccctcaagcagttcagtacgctcctaccatctcctgggagttcactaacgagacttctgaagagacccaaatgatgagactgaacaggacttaaaatcttcaaaggagctggtaaggagtctatgtaccaggaatacatgcaccccaggagtagttctcagtatacatagaggtcacaggtaaagaacaggcccactggccccataattaatatatatgtaaagagttgaaagtgtatgtctttttcccagaattatgaagataaactatttgagttggcatcttgtatcctatttttcctgaacatggacatttttctattttttacaaggtgctacattataagtaaatatgtaaattgtaatataagaggtatttctatcatcaggatagttgtataggattgcttgtcaagcttgataagtaattttatttcctttggtcacattccccaatagtcggacgggttataaaagtaccacggacactcgaggtaatttaaaatgtgattgggttgacttttctctccagataaaatatcgactgtgtgtagttttatgtaattacaacaacagcctgagtagctgagtctagagatatttgtggtatgctctaaagtatatagaagatgttcagatcttaaacttggtggatttgtttgctagcattaagcagaggtattcctatgatttgagtgttgcctggagctagaaatggataacaggtccagaaagaggcaggttagcagatgaagctatggtctctcattcttaaaaacaaggtagtggaaacgtattttgcttcaaaaaaggaaggagaaaaaaatgaaaagtagagtcatagaaaaggaaagcaatagcttttagttacacagcaattttacacgggagtcagttcatttgattgggcataacaaaaatatctgggttttttttttttttcattgtcttgggtggaatttgcacttacaaagctgtctgcttgacctgaagatctcaggtaagctgtttgtgccttgaaaccagcttctggaggcttgttggttagcctcaacttgcggtcactcatgggagtagaagtccattggttttagttgaaagttcattttcattatgacacatgtaactgtgggtcaattgtagctgttgtcaagaggacctgaagtggctcattccaataacgttctaatgcatttttgtgtctgtgtcaattagcattttctgtaggacaaaccaccccaaactaagtagcttaaaacaatcatttatttactcatgattttggggatgagcaatttgggctgggctcaactaggacaactttgctttgctccacatgatgttgtctgaccctcacacatgaatttacactcaattgatagttgatggcctcacatatctggtggttgctggctgttggcagggaaatggaggtaactgggtcatgtgtctctcattatccaagaggctagcccaagtccatttatgtgatgttgatctgagagtgcctatgagcagtaagagagggcgagcttcagtatgcaagcagcgttcaagcctctgcttgtgtcatattgctaatgccttgttgcccaaactaagtcatatgtccaagcccagactcaaagagtagataattagactgtatttcttggtgggcagatttgtatagtcgcatactagggaacatgcatatggaatgggaagaatttgtggccacttttgcaacttaaaaaacattgatttctcttctagtggaactggtcactgaactagaattcatataaaggtttgagtgatgcctcctttggaaaggcggcttgtacctactctgcacaaaaccatatgctaatgagcttctgacagtatttagctaaatctgcatgtgacaaaaaatagttcttggtagagttattcctaaccacatagggcatgctataaatgatgtcctagagagaaaatctgcatgagctctgaggaggtagtcttgtggccattaacactggtggcaaaacattaggctaaggcagattagggatttttgatactttagacctggagtcagcacattttctcagtaaaaggccagatagtaaatcttcttggctttgaaggcctcatgtggtctctgtcacatagtccatatccatctttgttttttctataaacttttaaaatatgtaagaaaaattttttagctcatggaccgtatgaaaagacttcaggccagatttggcccatgggctgtagtgtgccagcccctgattgggacagcttttgtttcagcacctccatttgttctttttttacctttcctgaatggagagtagtttttgtgttaggagagaaattctgcagaatcctataggactgttatggtgaaatgagttccacagtcactgaatagaagtaggaattccctgtattgggaacacaaagtctagcaatgttttctttctgaaacatctgtagatttctttttctttctttctttttttttttttttttttttgagacagtcttgctctgtcgcccaggctggagtgcagtggcacaatctcggctcacttcaacctccgcctcccagtctcaagcaattctcctgcctcagcctcccaagtaactgggattacagggccccaccaccacgactggctaatttttgtattttcagtagagacagcgtttcaccatgttggtcaggctggtctcgaactcctgacctgaagtgatctacctgcctcagcctcccaaagtgctgggattacaggcgtgagccaccgcacctggcccatctgtagcttttcatcaaggaacaggttctatccatcctgataacagactactactaatatatatttataacttaatgacctggatagttgcataaaacccatttgtaaattctgaaagggctttgaggagtttattttgttttaccttttcggttataactgggttatgttagttatagatgagacattattctaccacttcctgatcgaattttgatttttttcattatttatttaccatggagcttaatttgattctttcatgatgcaaaaaatcatgggtcaagttagcatccatttgatggatcatgccactcccaggctgctgtcagagactgccagcacccagctttatgaagaaaatgtctctgtaactgccaatattgtttctcagaaggctggattgattgttatgagccaattatagcttgtctaaattgagacaattttccttccaagtggggatagatgtcaatttgatggaactctttgtagttggggtaataaaagctacttgtttagcatttgagctagcaaaggcattgtcattggttttcagtgtagtagtttgtgagtttctaacttaactgacacatatttttcatattgaatagcttataatgcattttcaatgtctttaccatttttagtagttttagtgtctttaccattttcaatcagagtaacttaaaaagtaaaaatatccactttgtttctttaacatcccacagttatgagcaattccaaatgcatatctactgtctgtttagtgtttacaatttcttctttgccaaagtgcaagaccaagtcagaggcattcattcatccacttgggcagactgaacattagcccatggagcagctttgatagctgcatgttaggtatcaacagagtattctgtacagaaaatgcctttgttattttaaggtaagtcatctacaaatagtattaagtcagaattgactaagatttgatctgggcattcttgtgtgtttagtttttactttctactgcaaatataatttatatagtgaagtactaatctagtggagagctcaatgaatttctacttttgtctatacatacctgtgtaatagctcccaagtagaactacaacacttcctagcaacccagaaggttcccttgtgcccctttcctagtcaatacacacccctcttcccccagaagtaaccaccattctgacttctatcaccatcagttacttttgtttatttttgaatttcatgtaggtagaattacagagtatgtactcttttttctagtttcttttgtaagtataatatctgtgatattcatatatatttttgtagtttttgtttgtttgtttgtttgtttttgagacggagtttggctcttgttgtccaggctggagtgcaatggctcgatctcggctcactgcaacctccacctcctgggttcaggcgattctcctgcctcagcctccctagtagctgggattacaggcatgtgccaccacgcccggctaattttgtatttttagtagagacggggtttctccctgttggtcaggctggtctcaaactcctgacctcaggtgatccgcccaccttggcctcccaaagtgctgggattacaggcataagccaccacactcagccagttcgttgttttttatggctgtgtggcattccattgtgtgactataccacaattcattaattaattctactgttgatggacatttggggtgttaccactttctgttatgaataaagctgctataaatattgctgtgcatttattttagtagacagatggactgatttgtcttggatgcatttctgggtaatagggtaggcatgtgtttagtaggagctgggcattcttaatcccccaggtaccacagtcatggattcctccttatatagaagagggagtcaatggtgggtttaaaatcttaatgatgtgcaattgtgaggtggacagtggaaggatttcatcatcagtgaggcagctgacagagaaatgctgagtgctgcctagaagtaacagggactgcacagtatgtggaatgcaaaaagctggtgcagcagtaagcgctagtcagcctgctgctggagctctgaccactgagctgctgcaccccgccggtgtaggcagggagagtacattgtagccaccagaccgagagatttcagagagccaatagactactggtgtgaagcttctctcagcccaattaatgctaggcagggagagtacattgtagccaccagactgagagatttgttcagagagccaatacactactggtgtgaagcttctctcagccaaattaatgctcctattaggcagctttgtctttcctctgtttggcatagttagggatatacaaagtgtagagttgctgggggagaccttcagagagaggaagactttttctgccttttcatcccatgtgaggggtctgtaatcatgtcttagaaagctcttgtaagggcaatcctgagaaatcttttttttttttttttttttttttttttttgagacagggtttgctctgttgcccaggctggagtgcagtggtgtgatcttggctcactaaaacctccacctatcgggttcaagcaattctcccacctcatccgcctgaggagctgggactacaggtgcgtgccacgatgcccagctaattttttgtatttttagttgagacagggtttcaccatgttggccaggctagtctcaaattcctggcctcaagtgacccgcccgccttggcctcccaaagtgctgagattacagtggcaagccacggcaccaggccctgaaaatcttaattgcctttgattttgggagcttagataaaatgaaatagttttcattctggaggataacagagagtatctgcctacagactgatcatacccaaaatcatgtcatttcaaattttgtagatcttttgaaatgatgtagttagaaattttcaggtagagttgtaacttttcagttgacattttatgtcccttttctgccaatttcattaagaaataattgaagtcttat

SEQ ID NO: 3166 - DNA, 5396 bp, Homo sapiens
gtccctaacggtcttcggaagcgaagcagtgtcaacagtccctggtaaacacaagtagtattacaagtcgggagctcttcaagtcttggatgagactgtagagcggtcttgtgcggcaatgtgctaccttaaaataaataaataaataaacccctgttatgtccggagtttgtttccacccggagaggaatggaagagcaccagagagcgcttagctttctggttggatgttttgggctctgaggtcagcttggagaagaaaaaaaagattaagatgccagtgaagagacttcgtgaggtagtttctcaaaatcatggagatcatttggttttgctgaaagatgagttgccctgtgttcctccggcattgtctgcaaataaacgtcttcctgttggaacggggactagtttgaatggaacatcacgtggttcatcagacttaacttctgctagaaattgttaccagcctctattagaaaatcccatggtgtcagaaagtgatttttctaaagacgttgcagtgcaagtgttgcctttggataaaatagaagagaacaacaagcaaaaagcaaatgacatcttcatttctcagtatacaatgggacagaaagatgctctaagaacagttttaaagcaaaaagctcaaagcatgcctgtttttaaggaagtaaaggtacatctgttagaagatgcaggcatagagaaggatgctgttactcaggagactagaatttcacccagtggaattgattcagctacaaccgtggctgcagcaactgctgctgccattgcaaccgcagctccgttgataaaggtgcagagtgatttggaagcaaaagtcaattctgttacagaattacttagtaaattacaggagactgataaacacctgcaacgtgttacagagcagcaaacaagcattcagaggaaacaagagaaattacattgtcatgatcacgaaaagcaaatgaatgtgtttatggagcagcacataaggcatcttgaaaagttacaacaacaacaaatagatattcagactcattttattagtgctgcactcaagactagtagttttcagcctgttagtatgccctcctccagagcagtggaaaagtattccgtaaaaccagaacaccctaatcttggtagctgtaatccatctttatataacacatttgcttccaaacaagcacctttaaaagaagttgaagatacgagttttgataaacagaaatctcctttggagacaccagcacctcgcagatttgctcctgtacctgtttcaagggatgatgaactatcaaagagggaaaatcttttggaagaaaaagaaaatatggaagtgtcatgtcacagaggaaatgtaagactattggaacaaattttgaataataatgattctttgacaagaaaaagtgaatcatcaaacaccacctcactaactaggtcaaaaataggatggactcctgagaaaacaaacagatttccttcctgtgaagagctagaaacaactaaagtgactatgcagaagtctgatgatgttcttcatgaccttggccaaaaagagaaagaaacaaatagcatggtccagccaaaagaatctctgagtatgttgaagcttccagatcttccacagaattctgttaagcttcaaacaaccaatacaacaagatctgtattgaaagatgctgagaagattttgagaggagtacaaaacaataaaaaagtacttgaagaaaacctggaagctattattcgtgcaaaagatggagctgccatgtattcgcttatcaatgctttatctaccaacagagagatgtcagagaaaattaggatcagaaagacagtggatgaatggattaaaactatttctgcagaaattcaggatgaactgtcaagaacagattatgaacaaaaaagatttgatcagaagaatcagagaaccaagaaaggtcagaatatgactaaagatattagaaccaacacacaagataaaactgtcaacaaatctgtaattccaagaaaacattctcaaaagcaaatagaagagcattttagaaatctacctatgaggggcatgcctgcttcaagtttacagaaagagagaaaggaagggcttttgaaagcaaccacagtaatacaagatgaagattatatgttacaagtctatggaaagccagtttatcagggccatcgaagcactcttaaaaaaggaccatatctcagatttaattctccatctcctaagtccagaccacagagaccaaaagtaatagaacgagttaaaggcactaaggtaaagtcaataagaacacagactgacttctatgcaacaaaacctaagaagatggattctaaaatgaaacattctgttcctgtgttacctcatggcgatcagcaatatttgttcagcccaagtagagaaatgcctactttttcaggtacattggaaggtcatctgattcctatggcaattcttttaggacaaacccaaagtaatagtgataccatgccacctgctggagtgattgtcagcaagccacaccctgtaactgtgactacttctattcctccatcatctcgaaaagtagaaactggagtaaagaaacctaacatagccattgtagaaatgaagtcagaaaaaaaggatcctcctcagcttactgtgcaggtattacccagtgtagatattgacagcatttcaaatagtagtgctgatgtcctttcacctctgtctagccccaaagaagcatctcctcctcctgtgcaaacttggataaagactccagaaattatgaaggtagatgaagaagaggtgaagtttccaggaactaactttgatgaaataatcgatgtcatacaggaagaagaaaaatgtgatgaaattccagactctgaaccaattctggagtttaacagaagtgttaaagctgattctacaaaatataatggtcctccatttccgccagttgcttctacttttcagcccactgctgatattctggataaagtaattgagagaaaagaaacactggaaaatagcttaattcaatgggtagagcaagaaataatgtcaagaattatctctgggctctttccagtccagcaacagattgcacctagtatcagtgtttcagtcagtgagacaagtgaaccactgacttctgacattgtggaaggaacaagcagtggcgccctccagctttttgttgatgctggtgttcctgtgaactcaaatgtgattaaacattttgttaacgaagctcttgctgagaccattgctgtcatgctgggtgacagagaagcaaagaagcaaggtcctgttgctacaggtgtttctggggatgcttcaacaaatgaaacatatttgccggcaagagtgtgcaccccactggctaccccacagcctacgcctccttgctcaccttcatcacctgctaaggagtgtgttttggtaaagactccagattcttctccctgtgattcggatcatgatatggcttttcctgtgaaagaaatatgtgctgaaaaaggagatgatatgcctgccatcatgcttgttaatactccaacagttacccctactactacacctcctccagcggcggcagtttttaccccaactttgtcagatatttccattgataaattgaaggtatcaagcccagagcttcccaagccatggggtgatggagacctgccactggaagaagagaaccctaactcacctcaagaagaacttcatccaagagctattgtaatgtctgtggctaaggatgaagaaccagagagtatggatttccctgctcagcctccacctccagagccagttccctttatgccatttcctgccggcaccaaggccccttccccctcacagatgccaggttctgattcatcaacactggagagcacattgagtgttactgtcactgaaactgaaactttagataaacccatctctgaaggagagattttatttagctgtggtcaaaaattggcccccaagattttagaagatataggactgtacctgacaaaccttaatgatagcttatccagcactctgcatgatgccgttgaaatggaggatgatcctcctagtgaagggcaagtgattaggatgtcccataaaaaatttcatgcagatgcaattctttcttttgctaaacaaaaccaggagtcagcagtttcccagcaagcagtctatcattcagaggacttggaaaacagtgtgggtgaacttagtgaaggacaaagaccccagctaacagcggcagcagagaacatcttaatgggacattctctctatatgcagccacctgtcactaatacacagtctttggatcaacaatgtgatcctaaaccattatctcggcaatttgacacagtttcaggtagtatttatgaagattcatgtgctagtcatggtccaatgagtttgggagaattggagttggagccaaattctaagctggttcttcccacaacacttctgacagcacaagaaaatgatgttaatttaccagtagccgctgaagatttttcccagtaccaactaaagcaaaatcaggatgttaagcaagttgaacacaaaccatcacaaagttacctacgtgttagaaataaatctgatattgcaccttcacagcaacaagtttcaccaggtgatatggatcggacacaaattgagcttaatccgtacctcacatgtgtattttcaggtgggaaagcagtgccactctccgcttcacagatgccccctgccaagatgtcagtgatgctgccgtcagtgaacctcgaggactgctctcagtctctgagtctcagcacaatgcaggaggacatggagtcttcgggggcagataccttctgaacgggaagagacagccagcacagtgtttatgccactggttttaaagtcattttaccttggcttaaaaccctctctcagactgtttggtttttgagcatattctgaaaaaaaaattccaatattttaaaataaaacaaaaagcataatttgggtatttaaagtttttaaataaaataagtataagtcattataagtctgattgtgagttgtttcttagaatcctgagatagcatagagtagtgaaagggcatggcttttgacatctaggcatttaatctataggtgtaattatctgtatgtatttataaaattatgtagctcaaggttattcattctaacatttttataacagcaaatagaaaaaatcaaatgtctatcaataatagactggttttaaagtgatggtacatcagtacaatggaatactatgtattacaaaaaaaaatttaaaaagtttattgatatggaataatctttgagatgcactgttaaagtgaaaaaagccatgtgcaaaatagtg

SEQ ID NO: 3167 - protein, 1523 aa, Homo sapiens
MPVKRLREVVSQNHGDHLVLLKDELPCVPPALSANKRLPVGTGTSLNGTSRGSSDLTSARNCYQPLLENPMVSESDFSKDVAVQVLPLDKIEENNKQKANDIFISQYTMGQKDALRTVLKQKAQSMPVFKEVKVHLLEDAGIEKDAVTQETRISPSGIDSATTVAAATAAAIATAAPLIKVQSDLEAKVNSVTELLSKLQETDKHLQRVTEQQTSIQRKQEKLHCHDHEKQMNVFMEQHIRHLEKLQQQQIDIQTHFISAALKTSSFQPVSMPSSRAVEKYSVKPEHPNLGSCNPSLYNTFASKQAPLKEVEDTSFDKQKSPLETPAPRRFAPVPVSRDDELSKRENLLEEKENMEVSCHRGNVRLLEQILNNNDSLTRKSESSNTTSLTRSKIGWTPEKTNRFPSCEELETTKVTMQKSDDVLHDLGQKEKETNSMVQPKESLSMLKLPDLPQNSVKLQTTNTTRSVLKDAEKILRGVQNNKKVLEENLEAIIRAKDGAAMYSLINALSTNREMSEKIRIRKTVDEWIKTISAEIQDELSRTDYEQKRFDQKNQRTKKGQNMTKDIRTNTQDKTVNKSVIPRKHSQKQIEEHFRNLPMRGMPASSLQKERKEGLLKATTVIQDEDYMLQVYGKPVYQGHRSTLKKGPYLRFNSPSPKSRPQRPKVIERVKGTKVKSIRTQTDFYATKPKKMDSKMKHSVPVLPHGDQQYLFSPSREMPTFSGTLEGHLIPMAILLGQTQSNSDTMPPAGVIVSKPHPVTVTTSIPPSSRKVETGVKKPNIAIVEMKSEKKDPPQLTVQVLPSVDIDSISNSSADVLSPLSSPKEDPPVQTWIKTPEIMKVDEEEVKFPGTNFDEIIDVIQEEEKCDEIPDSEPIFNRSVKADSTKYNGPPFPPVASTFQPTADILDKVIERKETLENSLIQWVEQEIMSRIISGLFPVQQQIAPSISVSVSETSEPLTSDIVEGTSSGALQLFVDAGVPVNSNVIKHFVNEAETIAVMLGDREAKKQGPVATGVSGDASTNETYLPARVCTPLATPQPTPPCSPSSPAKECVLVKTPDSSPCDSDHDMAFPVKEICAEKGDDMPAIMLVNTPTVTPTTTPPPAAAVFTPTLSDISIDKLKVSSPELPKPWGDGDLPLEEENPNSPQEELHPRAIVMSVAKDEEPESMDFPAQPPPPEPVPFMPFPAGTKAPSPSQMPGSDSSTLESTLSVTVTETETLDKPISEGEILFSCGQKLAPKIDIGLTNLNDSLSSTLHDAVEMEDDPPSEGQVIRMSHKKFHADAILSFAKQNQESAVSQQAVYHSEDLENSVGELSEGQRPQLTAAAENILMGHSLYMQPPVTNTQSLDQQCDPKPLSRQFDTVSGSIYEDSCASHGPMSLGELELEPNSKLVLPTTLLTAQENDVNLPVAAEDFSQYQLKQNQDVKQVEHKPSQSYLRVRNKSDIAPSQQQVSPGDMDRTQIELNPYLTCVFSGGKAVPLSASQMPPAKMSVMLPSVNLEDCSQSLSLSTMQEDMESSGADTF

SEQ ID NO: 3168 - DNA, 7882 bp, Mus musculus
cggctgccgcagcgccgccctgcgcgaggcggtactgccgcggcggagggataccgcgcaccgtatatatatcgcggcacacaggctcgcgctacggcagtggtgctgggagtctcgtgtccgtggtgccgttactcgaagtcgggcggcggctgaggctcagcgcacaacgcaggtagcgcgttagcagcagcagaagcggaggcacctcggcggtcacagcccctgcgctggtgcagccaccctcgcctgctccgttcttccttccttcgctcgcaccatggtaggttgggatcggcagtggcagacgtagcagctgcccgagctttctgaacagatttgtagttgagtcttggggtctcccccttttcctggttgaggttaccccctaccccattttgccaggtgttacgcagcagctgcagtgaaaggggatgtattttcgggtttgcatctccgctctggctgccagagaacctcctctgagttttgggcgcctctggggctggactctacagtgggctgtgcgcgggctggagccgctgccacagctgcaccggggccttccgcatccaccccctccgccagccccgcacccactgcatccaacgcgccgcacccgggctgcctgcagcgcagcgcctcggccggggccagcggggcgggggagccgggcggggcaggccgcgacgtcccggtagtcagtccccgaccgcggagaatgaatgggtcgcggcgagccgggagacgtacagggcttggaccgcggcctcggggtgtcctcagccaccttcagaccccctgaccagcccagtcgggagtcccccctcgcttgcggtcccctccttcctcccggggggcgcggcgcgggcgtgagctgggaaggaaggagccggggaagggtggggttgggggcaggaaggcgaaggctggggggcggagagggcggaagcggccgccctgcgcccgggcggggccccgcagggtggccgcgcgcgtggctgggccgtgcgacctcggtccccctcccggtgccgcgcgagacgggcgcgatcgctcgtgtccgcggggaggccccttcccgcgggaggtgctcggctcgcgctaattggggcggcagggcgggggaggagagagttggcgcgctcctcggtttccattagagacgcaaagtttctgctggggaggaggcggcggcaggctcagtgcctgggggagcaggagcggtgggaggtgctggagataggcagcaccacggtcctggggcccctttgggtcttcaccctagtgcggcccctcgcccggcatgccccttgtctctcgctgctccctgggcggcagggagatgcccatctgtacgtttccgctttctctgccgcctctggattgccagatgcgaatatgtggttggccgtgtgcgtgtgccgtagcccccttctccctcgccaggcagagctgacatcaccagcagcaccttcagccctggcaaggtggctaggtcgttctcggcaggttctggaacgcctttgacccaaagccagaatgacttggggttgaggtgggggagtcgttgtcccgaaggtagatgcacttgacaggcctctagtcagagaattttcccgaggaggtggaactcctctccttggtgagctggtttctcctacgaggtgtgacagtgcttcctgtcgtgcaagactgacatggcgagcattacataaatcgtgtctccatttgccttaaaagtagcttccagtaatggatagaagggaagacccacttagaatttaaaaagtagaagttcgttctctcccaaatcgataattaactgagttgccacggaaaagaaatgagctccagtgccatcggatttctcttggggtttattttgtaactggctttattaaagcatatattctcctggctagaggcacaggttcagaggtgcaaaaactaaatattaatgcaaatgaaaaccacctttgtggccatttagtacctagaacatggaaataccgagtattggcattaaagcagagtccctgtcaatcttaaggtgggcaggattaataccaggaaatgataatagttactcctgtacacgaggaaaggggtaacgtatcgcctcataattgtggtggtttctgtgtgcttcatttttgcagttttgtaacagtcctaggattcagtctttctctagctttagaatcataggataatttgactgaaaggtattagccattgtaaatggtaggcttttagcaaataactgcctaatttaaatgattggaaagcatttattatactgaaatgaaacctggattggtaacccattactgtatatttttctacttaattgtttctcataaaatgggtataaaagcctgttaatccaacccaataccattatgtaacgccagtgtggagattttggagggcccaaagctatgcgcaaggtgcactaaaaagcctgcccctggacaggatcctggtcctggctgccttcttgtccgcggcattgggctgggtctcttggatgaaatcagcaaccgcagtgtttatggcgcagtaggtggcgctcttccttctctgcctgctgctgcagctgctgctgagggtactttaaccactagaggcgccatttcccacatgcgactgactggtttctttgcagtgcttagcgcaagccgcaggccaagcaagccaagcaagccgcaggccaaagaaatgaagccagcagaggctgtcacttcgttgtcaccctttattgttaagctagcttgaacagttttcctttattgaagtaactgcgactaaatgccagtactaatgaattcagcacacttttaaaatactgattaggaagaaaagccccacaattttaaagtataattaggaaagctaggttattatcaaccaaacttgtctagattaaattatgatcttttctttctctgtgtaggctgatcagctgactgaagagcagattgctggtaagttgaagactctggagagtccccaggaaactgggactaggctctgctttggccttgtgtctcctctcttgtccctcccatctacaatctgtgtggttttctaagaattcttaagcagcaacagtgaggtcaggtattttagggatgacatggaatggactctgctatgcctgtcacactcgggtgtgcatagctgtgctgtagaatgagatccaccgaagccgctactctgaaatagacttcatagttcttaggccataaatcttttagtaatcgaccaggaaaactcctaaaacacatggaaaaggtaaacattagagttgtaataattggaaagtgagacatcaaattgggttttgttttgagatggatgtctcatactgtagtgccggttattctggaacttgctatgtagaccaggctagatttgaacttagaagatctgtagtttgcctccagagtgccaccatgcccagcaactcaccttaatgtattgctcactgggcaaggacattcgctgctctttgcagaggactcaggttagggtcccaagacccatatggaaatttgcagtggcttataactagttccaaggggtccaatgctgccctaccctctgcagacagcaggagcgaatgtggtatacataaagacacatatacaggggatgcaggcaagtactatacataaattaataaaaaagtttctgtttaggacttctgaaaaaatgtcctgagtgtgacagagaaagagtgtggtgactgcctgggaatgcatgtttctagtaaccatgttgctatgaaacaagctcactgtggctataaaagtgcagcatgaaaggactctcttgaagggactttattgtacctggtaaatcggcagtctcagattacacttagtgaccaatttaagtatgttcaagctagttttcttaaaaagtaggatattgtgactttattgagcctggtcactagtgtttgttttctgggctactatgtgttagccagaccaacaggtctattgtgatcattatttcagtaggttgaggccagatgggttctggcaactcagacagcttgttgtggcaagccccagtgaagtgtgtgtcacaacagtgttgattctaaagagtcaacttctcttttcagaattcaaggaagctttctccctattcgataaagatggtgacggcaccatcacaaccaaggaactggggaccgtcatgcggtcactgggtcagaacccaacagaagccgagctgcaggatatgatcaacgaagtggatgctgatggtaagggctttagaactgagtgagcaccagggatattgtgtagttcaagttcagactcattacagaatgaataaggtccctagagcaaagctgtgtgcagagtcactttctctggttgcctcagcctcctgacattagaatagaagactgtaggcctgcctgtcaggtcgctctgctggctgccgtagtctagagcatttcctggattggttcactattgttcttttctgcttactgagagctacagcccagtcttttatcagctgcctgctgaggctgcaccaaatcctgtgtgggaagtaaaaacaacttgctggagaacctgcttcttaaaggagctgttgtttctcaaaggaggaagagcccgagggcactgggtggagggagcacccctcaactttagtagagtctgaagactataaggaatctgtggaatcttagaagggaagctgtgcaaggctcgggccagcaaagccagcagcttccccatgacattgactgttcctcctctagattacaaacttactgctcctatttgtcagtgaactggtttggaggcaccctctcccctaattgaaaagtcacatatatgtaggaatgataagttttaaaggagctaagaaggtacaatatgaacctaaggtgtgctttctagacagttgctgtgagaggagccatttgggaaaatatggcgccattaagtgtcgtgatggacttgggttttgtgtgcacattgaaagacttgtaaaggttctgctcctcctcggtgctgcttctggtgacagagttgatcctctgtacgcagcatgggctgggcctttcctgttgtatgtaaatcctgggaggccaggctcagtagggagcgtgcatttgactatcatatcatatggaacagttggagaggttgaataaagccttgttttgataccaaaagctatcttctcatgcttatagataacacttagttgtttgtttttgtcttacatgaatagagaatctttgatggtgtgttcacgtatattggtatgtcactgtggggattgaaccgagggcatgaagccatccatacacagtagccttggcagttacttgttttaaatgttctggtgaaaatgaattgtaaataactactggtttttgtttttttcctaattttatttttgatttgaagctagtgttaatgtgggatttgtctttgggagtatttatcccttagcttagaggagtcactgagaatattggcttttgagtggattcctctgacagtttcttgaacatgaatgatcctaaactgaaaatggtttctgagctttttttcccccttcattgggggtttaggagcaagggtgagtgagtgcttagcgtataagagccctgggttcaatcctcagtaccaaaaaaggccatgttgggtagggacatggctagaaaggactagggctggaagtgcacctggagaggactagggagactggccagggggtagcgaggtgttttcttctctcatctttttcccctaaaacattttgtacatcactagggcattattagtcaggcccgaggcgtctccctggacaggcagttgcacgcttcctttttctttgccctgcctcatctgttttcatagttgagagttcaggtgcagcttcctgtgcacctgtaggtgctctgggcaccgcctagcagtggagtcacgtgatgttgttgctctgggagatgttggagcattttggctaaagagggttaacctaagaagagcagtagtttatcattctggttggcacttgagtcctagcagatgcggggacatcccataccgtggctctaagattatggctacacaggagagtcaggtggtccttaccctgcgtgactgtttctcttctcattaaaggcaatggcaccattgacttcccagagttcttgactatgatggctagaaaaatgaaagacacagatagcgaagaagagatccgcgaggccttccgagtgtttgacaaggtaatcttgcacactggccttggagaggtgcacatggtgccctgtgctggcacggctgaaagttgcacctgttggctggttagagttggcctgagtgtctgactcctgtaaggggcagtattggcctggctgaggtgaggtccagcagagagaaacactgaattgactgtccccatctttgttctgtttggtgtctgtctgcttttgaaaaaccgtctgcgttctgtatttgataactggtggggtctggggatgggggagggttggggtgcagagttggcattactctgggaggaagaagagtaagttcattcagagagattgtcctcttaaaaccgccatcccccagtgccttgtaacgtcattgcttgttcacaggatgggaatggttacatcagtgcggcagaactgcgccacgtcatgacaaacttaggagaaaagctaacagatgaagaagtagatgaaatgatcagagaagcagatattgatggcgacggacaagtcaactatgaaggtaaaggctaagtgtagtcttcagcctggttttcagtagccctgaggtctgttacatcaggtcagcgcctgctgtggatggtcaccagttgtgctgtacacagtagatgtgttggccacagctgcttttgaagatactgaaatgttatgattatttgtcttttcagaattcgtacagatgatgactgcaaaatgaagacctactttcaactacttttccccctctagaagaatcaaattgaaatcttttacttacctcttacaaaaaaaagaaaaaaaaagaaaaagttcatttcttcattctgtttgtatctagcgaagctgaatgtcagaagcccctctgtccacacacaaagtctgcatgtattggtcggtggtcctgcccctaaagtcaagcccctacatcagttttacagtataaatactcgtactaccttataaggaagcacttagtggactccttaaagttccatttgctaatgattaatacactgtttgggctggccagtttctcatgcatgcagcttgatgattgagcacagtcaggcatttgtattaaaactgaaaaatggaaaaaacaaattcaaaatctcagatggcttctagttcaatctgttcagataaattgtcagcagccagtttactgcaagcaaacatttaaaattggtttacctcaggatgattgatgtgcagagaatgggggaaggctaaactctgagacacagccccagaagtaggacagtcctcatcaagtgccccagtcccatggtgacagtgacaccctggtggcgagcccgagtgtgatggttcattgctgtgcgcattgcattggagtgactgaacaacaaggctgtcaccaaatcccacacattttattaagaaatgtttcctaagggagcatttttggactgtgttttaaaacctagtgaaccatgactcggagccagcagagtaggctgtgtctgtggacttgagcacaccatcaacattgctgttcaggaaatgataatttacgtccattccaagttgtaaatgctagtcttttatttttttttttccaataaaaagaccattaacttaaaa

SEQ ID NO: 3169 - DNA, 1617 bp, Mus musculus
cggctgccgcagcgccgccctgcgcgaggcggtactgccgcggcggagggataccgcgcaccgtatatatatcgcggcacacaggctcgcgctacggcagtggtgctgggagtctcgtgtccgtggtgccgttactcgaagtcgggcggcggctgaggctcagcgcacaacgcaggtagcgcgttagcagcagcagaagcggaggcacctcggcggtcacagcccctgcgctggtgcagccaccctcgcctgctccgttcttccttccttcgctcgcaccatggctgatcagctgactgaagagcagattgctgaattcaaggaagctttctccctattcgataaagatggtgacggcaccatcacaaccaaggaactggggaccgtcatgcggtcactgggtcagaacccaacagaagccgagctgcaggatatgatcaacgaagtggatgctgatggcaatggcaccattgacttcccagagttcttgactatgatggctagaaaaatgaaagacacagatagcgaagaagagatccgcgaggccttccgagtgtttgacaaggatgggaatggttacatcagtgcggcagaactgcgccacgtcatgacaaacttaggagaaaagctaacagatgaagaagtagatgaaatgatcagagaagcagatattgatggcgacggacaagtcaactatgaagaattcgtacagatgatgactgcaaaatgaagacctactttcaactacttttccccctctagaagaatcaaattgaaatcttttacttacctcttacaaaaaaaagaaaaaaaaagaaaaagttcatttcttcattctgtttgtatctagcgaagctgaatgtcagaagcccctctgtccacacacaaagtctgcatgtattggtcggtggtcctgcccctaaagtcaagcccctacatcagttttacagtataaatactcgtactaccttataaggaagcacttagtggactccttaaagttccatttgctaatgattaatacactgtttgggctggccagtttctcatgcatgcagcttgatgattgagcacagtcaggcatttgtattaaaactgaaaaatggaaaaaacaaattcaaaatctcagatggcttctagttcaatctgttcagataaattgtcagcagccagtttactgcaagcaaacatttaaaattggtttacctcaggatgattgatgtgcagagaatgggggaaggctaaactctgagacacagccccagaagtaggacagtcctcatcaagtgccccagtcccatggtgacagtgacaccctggtggcgagcccgagtgtgatggttcattgctgtgcgcattgcattggagtgactgaacaacaaggctgtcaccaaatcccacacattttattaagaaatgtttcctaagggagcatttttggactgtgttttaaaacctagtgaaccatgactcggagccagcagagtaggctgtgtctgtggacttgagcacaccatcaacattgctgttcaggaaatgataatttacgtccattccaagttgtaaatgctagtcttttatttttttttttccaataaaaagaccattaacttaaaa

SEQ ID NO: 3170 - protein, 149 aa, Mus musculus [sequence omitted]

SEQ ID NO: 3171 - DNA, 31242 bp, Homo sapiens
cttgagacaagtccactgtgacctcagatgtatatacatccacatctctaagagtctcctggttactagggaattccgcacaagttcctcacaaaattcacaagcaagaatatttagaatcatgaaattctaaatctgggaagaaccagagaaagtccatctggtctaacttttacattttccagataagaaaactaagtcccgagaagggactagttagggaaagagcaggcttttagactgctctttcctttgacctttgaaaacattttaatcaaagaacaatcataataaggggagtagaggaatgttatcattcacagggcttccaagtgactgtggaaaatcttgggaggctttgctttggactttgttatccatttagggactggctgttctgaattgttctctgtgctaggccttatctaaaccgcttgccttaaatctttgaccttcatttaaattgctgacactttccccatgtgaaactgtatcataatttcttctgtcttctttaggctagcagcatttccctttcttattcccagaagagctcagagaagcttatttttttagatgagtgatgcataaaaaggaatgtggctgcacaattctaattatttcataaagttctgaggtatttttagggtgttgcaaagtgctaataaaaaataatcatattcatggacatacagagtggaataatagacactggagactccacaaagtgggagggcagtgagggatgagaaattacctgttgggtacatcgtatactactcaggtgacagtcacactaaaagcccagactccaccactgtgcaatatatacatgtaacaaaaatgtaccctttaaatctataaaaaataaatcctttctagcccagtttgctaagggttttttttttcatgaagaacatttataataaactctttgttctgcataaaaaaggaataatgtttatgtctttatttcccattatgtgacttttaggctgctttctaaaattttgatttcttttcttcaggtggttaaaacagtatgattggacttgtttagagcatggtgctctttcacagaaagagaaacttgttccaaggcttcagcagtatcctaaccccctaacccagctggccgtctagcaaatattcacagcatacaagtttcgaaagtcagaatggctcggtgggagcctatggtgtcaccatacggaacacagtttgaaatgtgtgctcaaaccacgaagtattcccatatgcaaaggttcccacaggtctcaattgaatctgtataaaaaattaaaaaataaaaataaagttcccacaggtacaaagcgcagaataccttttctcagttctttccccttctttaggacttgaaaatcagaaatgcctctagtagagtctccgtgtcagcagaccatttaaaatatggctcatatgttttgctgctattcagttttaaggtcatttcctaagtttcaaactttgtgggaaacaggtgcaactgtgaaccttcgtgtggcagggaagagctggagcagtgaaacatgaaactacaaatcagttctctgagtcacaaatctcttgggctgctgtggaagacagtgatgactcagcagaattgcatgggactggtggagggtgaggcggctgagggctcagtgccctgagtaccaacctgttgggggtgctgccaaatgatgggagaccgagttggatcttcccactgctgagcccttccgcagactaagtcagaccccctgacctgggttctgaatggatttctgacccacccattgccatttagcacaatgatattttaaatattatacgcaaccacatcgtatatttccctagggtttgtttattacactaatgttacagatgagatagctgagtctgcctggctaagtggccaacgaatcagccatttaacctagcaaatgagatgcagcaatatggtcctcttcttgggaaaaagctatttgctttgtcaaaacaatgaaaataacaaagccttgagtaacccttcatcaaaataagacaaattttctgtctatgctttttggtttatgagaatgagaatgagaaggaaggtgacacactgatactcagttgtacaacttgaaaacactcctgaaggtacatcttttcagtggccaaatgattcaatcatcccgttgtgatgcctggagttggtttattagccaatgactcagagcctcaacttagaatgaataaaactcaataagcatcttcactagattcagatggaggtggtttttctgttcaaagacaacttccctttgactatattttctccattataggaagcagaggatggatccagttatgtgaaagtctgaagaaaattgccaaaggatgggtcagccaaggtatacgcttgctcgtgactgtagaaggatacaggttgggatcaaagcagggatagttcaggatgttcctcaggaggtgtggcctcccaccttgctttcagaattaaagcaaaggactttcttttccttttgtattttgagaaattcacttttaatatcctcttcagtcctgagagtgaattgagctcaacactaatcaattaaatagttgactggtgtttaatgagtcaaatgctatgctgagttcaaaaagtatatcttggcttctactactatctggttgatgttagatatatgaaacgataatatcaggtagaaaaggacaagaggggtaggaattcagcggagaggaagttcatttggagttgtgataatcaggaaagtttgaaacatgttgcatttaaactgggcatgaaggacccgtaggatttagataggtggtgaggatatggataggcatttggacactaggaatggcatggaaaaggcaatgagttgagaggagacaatgtatattcaggggacagagacgatactgatttgtctgaagcaaagaatgtatagaataacaaaggatggtaatgctgaaaaagtagattggcaaactgttgaaaggcattgggaggcattgagggtttttgagcatgggagtgacatgatgaaactgctggcagctgtgcattggatggatcagaaggggacaagctcattgggatagataaagatcatggatgtgctattagaaattttgggatcctcaacattcctgatccaggcaaacacagatacttccttttttaaaatttctagaatggagctatctgatgtaacttattggaatgatggaaatgttccatgctgcccaatatggtaaccactagccatatgggcctattgagcacttgaaatgtggctataaagactgaggaactcaattttaaattttaattaagtttgatttaaatagccacatgtgattagtgactactggattgggcagcacagctctagaaggcaggacagaggctatttattgattgaaaaccaaaccacacagttgccaaattagatcttaagtctgttggaattggtggggccaattctttaatataacccacaatcagcatcaatttacctgatttatcattatggtctggttttccgtgtatcaagacctcagcgacagtacccatttgtgccaatcactggttctgctctacaggcaaactgagtcaccccaaaaccctgccatttcagtttatcgctgtggccacatatccctcaactgaatagctgttaaatcatttgtaaactgctaaatgtctgttgctgcgtggataagctttagacctgttctatggtttgacctgcattctagcacatatgttgaaatatgaagttgctggttatcgtttggatgctaattgaagttactattgcccttgctttcggattaatgaggaaaatgatagtttaagaatttccaggcctggctggacacagtggctcatgcctgtaatcctagcaatttgggaggccgaggcgggtggatcgcttgagcccaggagttagagaccagtttgggcaacatagcgagaccccatctctaaaaatagtaataataataataaattaattaattaaatttaaaaaaagaatctccaggccaggcatggtggctcactcctgtaatcccagcactttgggagtccaaggcaagaagattatttgagcccgggagtttgagattacagtcagctatgatcatgccattgtactccagcctgggggacagagcgagaccctatctcagaaaacaaaaaaagaaagaaaaaacccagcttgaagttagtgtaaacaactaaagcacaaaactatgatcttatcccactggacattttactatctgaattcactcacagtacttggtccctaagtctgtgtaaccattgctggctgcctttgacttaagggctcagttggttaaagcccaaagctgaggctcaagtcatgggtccagtctcattaatggccagttattttgctctgttcttattctatatcccggaccccactttctgtgttgcatatttatgacgttggtcacgagggtggcttgaccagagagggaacagaggaaggcaaatccatcaccacagctactagcaaaacaagcacaaatcctgtgaatggaggataagatatgttttctcctataaaaagcaaagtgtttcaaaataaaaaaaaaaaacaagaatgaggcactcaaagctagtgaatggtgctgtttggaaatactgcacttcagactactgagtatactggtgaccatcacaagctggaacatacaacaggacagttagtctggctatgagtcatttgaaatcatgggacactagccgggtgcggtggctcacgcctgtaatcccagcactttgggaggcggaggcaggcggatcacgaggtcaggagattgagaccatcctggctaacacggtgaaaccccatctctactgaaaatacaaaaaaattagccaggcatggtggcgggtgcctgttgtcccagctactcaggaggctgaggcaggagaatggcgtgaacccggcaggcggagcttgcagtgaggccaagatcgtgccactgtgctccagcctgggctacacagcaagactccgtctccaaaaaaaaaaaaaaaaaatcatgggacactaaacagacgccttatatgctaaaatggataatatttttctcatggtaagttgtcatggcctaacacttgcttattatgttctgatggtaacatattttcaaatttaaatgtaatgtaagaatgttccctctgctcattacctatatgagtcattcataaacattataacaacaaaaaagataatcacaaaattttaaatggaaaaataatggagtattttatttattgatagagataacaaaactttttgtaataatcctgaatagaatttaatgaaatgtaaatccaaacacaaacagcaagaatctgttctggcaattggagatgattagtgaagcagagaatcctgaatggtggatattcatctaagtactattggaccacggggtggagaaggagggagtcgaggatggtgaagaggtattactgactctcaaaccaaccaaccaaccaaccatatgtgtctctacctctctctcacacacacaattggatgtttgacagtgagcaagcctcttgacctctctagacctcagaggcaaaatgagaagtgtcctccagctagaaagcatcacaaattaaatgttttgctttaggttttcttccccaaacactccatattccttatgtaaaaatagagccattactacattcctatgatcgtattttaaattattgggtaagaagtatctctttataaaccaaattttcatcttaatctttgccacttctgcctcctaccccaaattaaaataaaaataaattctactaaattgcaggagatagttataatgtaatgcttaagtgcttgggctctcagctagatttttgggttccacttaaattaggcaagtcactgactcgttcagtgcctcagttcctttgtaagaataatgatacctgtttcacaggatgggtaggaggatgaaataatacatttagcacaaggcctggccatagtcaatgctgagtaattattttttatttttattttttgagacagagtcttgtactgttgcccaggctggagtgcagtggtgcgatctctgctgactgcaacatctgcctcccaggttcaagcgattctcctgccttagtctcctgaatagctgggattacaggtgcctgccaccacgcccagcttattttttgtatttttagtagagacagggtttcactatgttggccaggctggtcttgaactcctgacctcatgatccacatgcctcagcctcccaaggtgctgggattacaggtgtcagccaccatgccgagcaagtaattgttatttttaaactatttccatttctccatttgcattctccatttctccatcttcaatatatgtatatgtgtgtatacatatatatgacagaggttatatatgtatatgttataatcatataacctcagacacagggtttcacagctagaaggaatttctacatcaagtacaaaactcttgttacatctgtgtcctttctgtcagattcagagggttagagtgatttggttagtgacggaaatgatacttaaacatgagattcctggcttgaggctgcatcgtttttacttttcttccatttacttttatcttatttaaataacttcctatagaacaatttcctttaaatatgaaatgttccataggtttttggttctcagtaaattatgatattacaataatgcggtttattctcctgattgctgatctcttcataaattaggacgtgtattcacttaaagcagtctatttgataatgaaaacccagtgatttctaaataggcagtcagaagaatctgctttatgaaacagacaaacccctaacattgggcctttaaaatgttcggatatcaagaccacgaatatattatctaaattagagcccctgagcaaggactcaagctctattttatgccccatccctgactcacagtaagatcctgggcaagtcacttgaccttcttatatttcagagtgtcaaactgtgaaaagcatgtccataaaactgtgcaagcatgacctcattataaacccgatgaacttgaaagcaaagatgtgctttgatacattaaagaattaccaaaatagaactctagtttgtaaaatatgaagaatcaggaaaataaattttactatactaagtaaaaggattctgaaatgtacagtttttagcaagtaaagtcataaaaagtttcaaaatgttatatttaggtgaaataaggttaatgacagaggaaaaatattattttagagaatgcttggctttcaaaaccatagattgtagcaacttaaccaaaataatcacaaggaatggaagactatcagaaacgagtagatccttaataattaaacacatttctaggccattatttccccctacttatacaatgcatatcatgttttaaaatgtatttcactggctgggagcggtggctcacacctgtaatcccagcactttgggaggccgaggcaggtggatcacttgaagtcaggagttcgagaccagcctggccaacatggtgaaaccccatctctactaaaaatacaaaaattagccaggcgtggaggcaggcacctgtacctgtaatcccagctactcagggggctgaggcaggagaatcgcttgaacccacaaggcgaaggttgcagtgagctgagattgcaccactgcactccagcctgggcaacagagtgaggctctgtctcaaaaaaaaaagaaaaaatgtatttcactaactactatatgaaaagccccagagaaagaataccaatacccttaggaaagaagcagttttagtattattattattattggatggagtctcgctctgtcaccaggctggaatgcgatggcgctatcttggctcactgcaacctccgatgccctggttcaagggattctcctgcctcagcctactgaaagtagctgagattacaggcacgcgccaccacacccagctaatttttgtatttttagtagagacaaggtttcactatgttggccaggatggtctcgatctcctgacctcgtgatccgcctgcttcggcctccccaagtgctgggattacaggtgtgagccaccgcgcccggccaagatgcagttttaataaggagtttggccatttaggcttgtaactgactggattattgcatattctttaaaattaatttgtattagtcccttttcttctatttccttatctccaactctcgcattagtatgcacgctttattcctactcaggttttcccctatgagcccaggagtattattattatttttttgcagggattaggatcaggtttgtgaagtgaatagtgtctttctaatctgcagagggaaggcagcatcccctggcttgctgctgcagcctctctttaaattaaacagcaggttcactctttctgcggcattccagaaggaacatcagtaggaacagctccacagatgctgacgtcttgtctaaggttatcccaagaagtcctgtggcatttgcaatgtgcctgtacatttttccttttttaaaaaacatattcctgcagactttgttgaaaccagaaacaaacacaagcaagcaaagccctttctagcacagcatgttaatcacacactttgccatattctgtgaaacagtaagcaaatgataacctccaactgttgcccgggccctgtaaaacagaagatcaaattctgtgttctgccttggcaagaaaagaaactgcagcattttgtctagatttttacaagtcctggggttcacattactggctgaaattgttctttctctactttacagaaaaatggaaaacactagtaaacttaaagatttaaatattattttaaaaggaatataataaaaaatggaaaacactagtatatttaaagatttaaatagtcttttaaaaggaatataatcaaaactgtagtttaaaatacaatctagctccataagagaggcaattggctgtgtgttccacttgtaatgcagaggatttgaagcatctattttttcccttgtttctatggatttatgaataaagactctgacccttctcaggatcaggaaaattacgaaaaatttaaagcctgggtttaaggtctgtagaagctgcacaggtacactaattttagtaagacgggcgccaggaaaaagaacaaaatagtaggggagaaatattcaggcatcctaaaaaatattcagtggaaacgtaaaaacattaaagactgattaaacatcgcagcatgacacagatttagcaactgagcataaataatttgactcggatactgctccaaaatccgaagaggaccaatttcttccaggaggacaactacctcgtcctctgcagacccctctcctcggcagctgaaggagtgtggccaatctgcctccacctccccgcggaccccctactctcaggacctcctgcagcaccccaaactggaagtggccgctgcagacccaaggacgaggggcacgcgggagccggcagccctagtggagcggttggagatgttgaggtgggagggtcacccaggtggggtgaggctggggtaggtagcggagtgaacggcttccgaagctctgggccgcccccaggttggactaagcaggcgctctgtcttcgcccccgcccagggtgggcgtctcctgaggactccccgccacacctgacccgagaccgcgcgcccagcctagaacgcttccccgacccagcgtagggccgccgcgactggcgcgcagggggcggcgggaggcctggcgaacccgggggcgggaccaggcgggcaaggcccggctgccgcagcgccgctctgcgcgaggcggctccgccgcggcggagggatacggcgcaccatatatatatcgcggggcgcagactcgcgctccggcagtggtgctgggagtgtcgtggacgccgtgccgttactcgtagtcaggcggcggcgcaggcggcggcggcggcatagcgcacagcgcgccttagcagcagcagcagcagcagcagcatcggaggtacccccgccgtcgcagcccccgcgctggtgcagccaccctcgctccctctgctcttcctcccttcgctcgcaccatggtaggtcgggagtggcaaatgccggcgtagcagctgcccgagatttcttcccagatttctagttgttttgtttgttttttgtttgtttttggttcttggaggtttttcttttctgagtgttacgcagcagctgcgcttaaaggaggttgcattttggatttgcatctcggcgacctctgccagggagcttcatttattggttccccttggagctggacttggtcgtaggccgtccacgggcaggggctccggccgcaactgcagcgggggtttctgcatccaatccccctgccccccgcccagccccgcacccactgcatccactagcgccgcacccgggctgcctgcagcgcagcgtttcggcctgggagccgggcggggccgggcactagacccccccccccggcccgcccctccccaccccgcttctccgccggcgcgaaggtggcaggtcgggcgggcagtggagaatgaatgggctggagctggccggtggcgcacattgttccggccgggtgttgaggggcgcagtcagcgcccgccacctccccactttggccggccctgctgggcgccctccctcggtcgctctcccctccttcttcccggggggcgcggcgcgggcgtgggctgggaaggaaggagccggggaagggtggggttgggggcaggaaggcgaggggttgggggcggagagggcggaagcggcggccgggccgccctgcgcccgggcggggccctgcggtgtggccgtggcttgttcctgccgctttcgcaccctgcggccccccacccagtgcagcagtgcgggcgggcgtgagcctcggtgcaccaggaggcacttcccgcgggaggcgctgggctcgcgctaattggggcggggggggggggcggcgggggaggagggaactggcgcgcggcttggtttccattagagacgcaaagtttctgctccgggaggaggcggcggcgccgcgggctcgtcgcctgggggagcagaagcgggtgggaggtgcgggtggccttggcctcagccctggtgcgcgggggccgggggtggtgaccctcctggccgaggaggggcggcgtccagacgcccgctcgggggccgccttcccccccacgcctgcccccgggcacgcgccctgcccggtccctcgccccgcgccacttccagtccgcagagagatgccctccacgtttctgctttctctgcagcctctagattgccagatgcgactgtgcgcctcgctgggtgtgttttccacagacccttcctcctcggcgtgcagggctgacatcaccgactgcgtttctggtttggcgggtggggagatggttccccgcagggttctggtacacctttgcccccagggctagcgccatttgggggaggaggttttcgttgtcgagaaagttggatgctcctggtaacccctctaacaagagagttctgtagcgaggtgggactgttctccccataaggtgacagtttctcttgcgaggtgtggcagcgcttcctgttgtacaagacagatgttgccttggcgttacgtaaatcatcgtgtctccgtcatttaaagaaagccaatttttagtgattgaggtagaaagaaagatccgtttataatttgtaaaaacaaattttcacccagaatcaatatattggaacaccattcctactgttaaagttttcacttaagagcataaacttcatcagctttctattaggacttattttgtaattggcttcttaggcatccttctttaaaagagaaatccacgttagctctccttgaggtctcgagttccctcggctggaggcacaggttcagtggagaccaaataatgcaggtgaattaccttcgtggccattactgcctcgaacgaagtgtgtttattaagaacagttcttatgtcattcttaaggtaggtagggttaatactctccagcaaatttagtagatactctttgccagaaaagagaggagtatatatagtttgataattattgtgtagttttctgtgtacttaatttttgcagttttgtaacacttcatttgtaagatggtaccattttttcctggcttctgaatcataggatagtttgacccagggcattagccattgtaatggtagccttttaacaaataactgcctaatttaaaggattggaaagcatttgttacatggaaatgaagttggtggcgtacccagttgctgtatctttattttttctacttaattatttctcataaaatggatataaaagcctgttaatccaacccaatgccattatgtaacgccagtttggagatttcgagggcctggagcagtgcgcaaggtgcgctgaaagcctgcccctggatgagatccttatcctggctgtgatggcagtggcagtgggctgggtcccttgttgagtggaaagggggactgcggtgtccatggtgcagtaggtggcgctcttctgtcttagagcctgccgccactgcagctggtgccaaggggccttctgccactagaggtgccatttttcacatgatgaacttagcctagttagatcgcagagcaagctgtaagccatgggcccagaaaagaaaacttgaagtgagcagatgttgtcacttccttgtaatcctttgttaaaatagcataaggagttttctttattctatttactttcattaaatgaccgtgctacaggtttcaaaggattttaagattgatttttgaaagatcacaatattaaaagtataactggaaaatctatgttgaaatcaaccaaacatgtcgtggactgaatgataaccttttctttcttcatataggctgatcagctgaccgaagaacagattgctggtaagttgacaactccaaggagtccccagaaggccagaactaggcactgactcagttttggtgactcctctgttcctccccgctacagtctgggcagttttctaagaatttatttaaataagaacagtaagcagaaacactgaggtcagatgttattcttgccagtactttatagatgaggtgaaaggaagtaaaactaaggatgcccacatgttaaactctggagaatttgaccatgtttcacaatgtgcaaagtttgcgtatgattaattgtactgagcctgctactcagcggtttagtttacaattcttatgccatgggtctttcagtaatctgccacgaaagcttgtgctcgctatcctaaaataaatggaaatgggtgaatatgagtgttaggaccactgtagtaattgggaagaaagttacattagttaaactctgttgcccaggctggtctctaactcctgggctcaagcaatcctcctgcctcagcctcctgagtagctgggactacaggcatgtgccaccacgtctggcagattttagctttttaatattcctggaggacttgttttgagactgtttctcgttaggaaaccaggaatgcttctgaaatattctaaaagtcatgtggagagagtttacctgggaatgtacatttctagtaaccattttatttgttatgaaacaagggattcttatggctttagaaatgtaacaggaagggatttgaagggggcacatggaccaatcttgtcagattggatttagtcccttgaacctgggaggcaggggttgtagtgagctgagattgcaccactgcactccaatctcggtgacagagcgagactccattgtttaaaaaaaaaaaaagattggatttaggactaatttaagcatgttccagcttagccgccttgaaacctttgggaatattgtggtgtgtggcactgtttattgggagcagtgtttgctttatgggctgctgtatgaaggccagtccaacaggactattgtggtcattatttcagtagataaagaccagacttctgatacgttgcacaacttgaatggctggctttggcaagcccccggcaagtgtgtattgtgactgggttggataaagacattgattctaacgggtcaacttttgttttcagaattcaaggaagccttctccctatttgataaagatggcgatggcaccatcacaacaaaggaacttggaactgtcatgaggtcactgggtcagaacccaacagaagctgaattgcaggatatgatcaatgaagtggatgctgatggtaagagctttaaaaccatgaatgagggccattgttgtgtaattcaagttcagacatgttacaggattgtctttcaggtccccagagcaaagcaaatgtgcaaagatcctttctgtggttgccccagggccattgacaattaaaatagaagatgatgggccttgcgtccatcctgcttagtgtctagaatgttttctgcatgggatcactattgttttcttcctgcttggtgcgacctagagctcaaatctatttttttttttttttttggagacggagtctcgccctgtcgcccaggctggagtggcactggcgcgatctcggctcactgcaacctctgcctcttgggttccagcgattctcctgcgtcagccttctgagtagctggaattacaggcgtgtgtcgccacgcccagttagtgttttgtatctttagtagagatggggtttcaccatgttggccaggctggtctcaaactcctgacctcgtgatccgccctccccggcctcccaaagtgctgggattacaggcgtgaaccactgctcctggccgagctcaaagcttttatcaactggcccatgagtctgcactgagtcttgaggggggaggtgaaattaaatagccatagaaagtgctttttaacaaacttactgtgtttaaagaggaggaggaacccccagatgaagtaggtgacgagcactcttagaagttaccataaaagtgagtacagtgtgagctgtagatgtgtttgctgcagaggagcatgtgaggtttggaggcggatgtgtggtgactccaggggatagatttgcagaacctaacggaaagggaagctgtaaggtgcagggccagagggaaccagcagtaaccctgatagcggtctgtcatctgttcctctcgactctacagcagcggacaacagaactttgattgctgatttccatcagtaagcaggctttgaagcacacttccccacccctaaaaaaaaaccacgtattttggtaaatcctatatatattctaatgtactgtatgacagtatagaacatgatttttaaaagatgagttgggaggagaaaaggataaaagaaaaaataaaagaagcattaagaataaacaattcggatctagattttactttctagatgattgactcgagggtggtgtagtaaaatcgcttgtctggtcacaaacatttggcagcagagcttttgattaggttctttgacaaagccttcagcacgttagagtggttttcactaatagtgttttggaaagaaaaggttgtccatagttctctagtttgctaagatgatcagctacccaggaacgtggagtaacttcctcttgtttgtgggagccccgggaatctgtgcctggggaggggagaagtctgttaggctcttggattgtgtggaagaaggagaagttgtgccaggctacagaatcctgtgtttgcactgagaaaacaggatggtacctgaccttctctgcatggctgtgagatagcttaaaataatttcttttgtttttgatgaatatgaacaatatcttaaaatttttgaggctaaaaaagtcttgaagggatccctgaggtattttctttgaaaggtactggtgaaaatgagtaacttaacctaagggtttttctttctaattttatttccatttagttcaatgacactgttagtctggagtgcttgtctttgggggtattcatctcttagttttaaagaggagttgtttggagtactggccgtagaacagattgttctgacagttccctaagtgttactagtctgagctgtgagaatgctcctgagcttttcccttaatgggaaataaagatactgagttggaagaaaacaggtggctaaccatcatagcgtggccaagaaatgatcctggagaagacttggtaagacttcatggcccatgcatggcataacagaatcaatgttcctctctcataatcttttctcctctgaaacactttatacacttaacctgcagctcagttctaggccttttttgtgttactgctgtcactaaccaaggcagagtgagacctgagtgatttccctaactcagggatggcagtcgggggcgctttcttccctcggagtggaaagattcagcctgcggagtggtgtatgctatttttcttttgaactgtacagcccttcatgacccttccatgggcttgaatccagatgtgcagtttcctttgtataattaaatactatcctgggcactgatgatgagtttgaaattatgtgaaattgccctgtgaagtgtttgaacgttttagacctgcagatgattgaacctagtaagatagtctgcccctttgtcctagtacatgtttaccgttccgtacagtggttctgaaatgattactgcagagcagcgttaatggagtgcttactttacatgagctttttgttttttaattcgaggtaatggcaccattgacttccccgaatttttgactatgatggctagaaaaatgaaagatacagatagtgaagaagaaatccgtgaggcattccgagtctttgacaaggtaatccagcatctacatagcagatggtacttaagtatggcttcttccgctttcacttctaaaagctataataatgttatagacagaagacttaaatctaactgcctgagcctctgatctcactttcaaaaatcctccttatggtaaccgtatcaggggagggtaggcataataaataggaattttggaccatgtttcttgactgttactttgaattgttgtgagcttttgcaaatcctgttttctgcattagctgtttgcatgtatttagtaggttagaggtgggaactagagatcagagaattgtttatggcagcagagttagcagtaacttgagagggcatagctaagtcaaagacctacttccccacactacatcattagcaataacaattgctgaatgttcacaggatggcaatggttatatcagtgcagcagaactacgtcacgtcatgacaaacttaggagaaaaactaacagatgaagaagtagatgaaatgatcagagaagcagatattgatggagacggacaagtcaactatgaaggtaaaactaaattctctgagctcagtgtttcatagtcttacctttagatctgtaagcaagccaactgcttcactagacagcctttgactttattttatgtacagtaaagatgttgtgttcattaaagctgttttcaaagataaccaaaagttactattatatttgtcttttcagaattcgtacagatgatgactgcaaaatgaagacctactttcaactcctttttcccccctctagaagaatcaaattgaatcttttacttacctcttgcaaaaaaaagaaaaaagaaaaaagttcatttattcattctgtttctatatagcaaaactgaatgtcaaaagtaccttctgtccacacacacaaaatctgcatgtattggttggtggtcctgtcccctaaagatcaagctacacatcagttttacaatataaatacttgtactaccttaatgataaggactccttaaagttccatttgctaatgattaatacactgtttgggctggccagtttttcatgcatgcagcttgacgattgagcacagtcaggcctttgtattaaaaatgaaaaatgaaaaaacaaattcaaaacctattcaaatgggttctagttcaatttgtttagtataaattgtcatagctggtttactgaaaacaaacacatttaaaattggtttacctcaggatgacgtgcagaaaaatgggtgaaggataaaccgttgagacgtggccccactggtaggatggtcctcttgtacttcgtgtgctccgacccatggtgacgatgacacaccctggtggcatgcccgtgtatgttggtttagcgttgtctgcattgttctagagtgaaacaggtgtcaggctgtcactgttcacacaaatttttaataagaaacatttaccaagggagcatctttggactctctgtttttaaaaccttctgaaccatgacttggagccggcagagtaggctgtggctgtggacttcagcacaaccatcaacattgctgttcaaagaaattacagtttacgtccattccaagttgtaaatgctagtcttttttttttttttttccaataaaaagaccattaacttaaagtggtgttaaatgctttgtaaagctgagatctaaatggggacaaggcaggtggaggggaggccagtgtacatgtaaatgcccacagcccagcattgggtttccctcccaaggccccagcaccaacctctgagcccaagaccttgcctgaaaacaagcagataccgattgcttcatcctatttatggacatgtaggtctagttgcattttcactggggggaggggggaaggtgaattatggtaacttttaatgatctattcaggcagtagagctcttaaggaaaaaaaaaacccactttctctcaagcatgtatttaggggttgttctcaattgtgctgctgattacctgtcttatgtaactacttgagaccatctgcaagagacatgatttagtgtgtctgtaattcaatcttcgctgtgtgtggtagaagcagtagtcacttttgtaagccagtctcttcatgcctaaaagacactaccagtcacctttgattcgcgacttttaatttatgattatacttagcctcctcctcctttttttttttttcccaagttgacttgactttgcttttttccccccaagtagaactaatgctagcttccagcttgaaagtaaaactccagtgtggagtgaattttgtgtctaattataaacctgtaaccaaaactcagacatctggtactggtctttgcattgagattggtccctgtaaaaccccctttaaaagcatattgcatttagtacagagctcttttttgaaatgaaggctggagatgtgcatttttcacggtgttaactggttgtatcttattagcaaggagattggggttttgagtgtttgcgtgggtggtttcaatttgccagggaacagtggcaggctgctagcaaggcagtgagaagctcttggcagccaaatgggtgcattcagggctgatttatagagacccttggcttctccttctcctactccctgtctttctggcattttgtagcttgttagattttctgccagaggggtgggtcagagcagtggaggggagacatcgcccatgtgcttctgctactggtccttgggctgggtggttggtagaggagatgttgacactatgagctaagggttggcttttgtaattacctgaatctgaaaggaatgcctaaggttaccttggggtttctcttctggtgagatagggttcctggtttgagtaagttaatgtcctggatatttcttgtggcagggggtggtcaaagagcctgattgctgacccagtctcaggcctgtggtcgatgacctctcggtagtttcaaagggggctggagggggatatttgacttgttttttcgaaatgtagccttctaaccctcaagtctttagaagctgggtggactcttagtggtcctgcagcgtatcctaaaagactacctttgaaacaggattcttgtatggccaggatcgtgtctgggaaccagaaaccctacaccctccccctccagggaatgctgagttccagttttgagcagaggtgaggcagaatccactgtagccttccgccctggtatttggggggatgaccagcccaggcgttgggtgttagtctgcatgagtttgtgagaggaaatagctgggtgtcctggcagtgcccttgaagttggttaggaccttcctgtaaactcttgcccctacttctaactactctataaatatatacatatatttatatataaagtgattagttgaactggcatcctgctttagcctgagacttgccataagaaactgctgagtacttggcaaaccctttcatagttttgttctccatctgtttggggtaggtgttgagcgaggcaaatggatctcgatatttcagatgggcttttgatgcactgttgccaaggaaggctttttctgattttttgacaaatgaatttttgcacactttcattggtgtctttcggcaacttacacacattgaaaatgagctattgtacatatttttatattctctttataaatgcatgtctgattgtacttgtaacaatattgtaatgaacggctgtgcagtaggcccagcgctgctgtgtctcgtcagaggaatagcttaccacgaacccctcagcatactgggaatctcttcctgaacaacgaatgtaaatttggtcaagtctactcttccgttcattcaattattttaagcatttgaattatttattgtatatcctaaatatatttctcctttggcagtgactagatttccactaatgtgtcttaatctatccctccagctggcagttactgtttttttaatcccctgaagttgtcctgtaggagacagaaattctttgctgtctgtatcccttggagtaagaaggtagtggcatgggtggagtgtgtgttctttctccaaatctattatgatgtttattaaacacttctgtagcaaagatggtggtagttcttttgttactgaagttgcccttcaccatggctatttgaaaaggagatgtacttggacgtttctgtaaatcttgagataaactgtttggagatttaaccacctctctgatgggggaccaactctatggaaattgtaaatacgttttatttataaacctggcactgtattcaataaacatttctgcagcctttcatctctaactgcgaactgtgtaggtttctagcttgcatagctttcaattccttttgctctcaacaagatagacctgccctcagatgtaatttcactgggtctctagtactgtgagagtgaggggccagaaataaccgtagacacatcccacaaccgtcttaccctagttttaagtagtttgagtgttaatagctgacattttaacctattctcttagcctattaacttgtccatgcttgctttttatgcggaaaatttacaccataaggattagtttccttttaaccccaatccaagcctctttaggacttgtataaagaaatacatttttttcaataagatgggaattttagatgacaaccaagatgataccttggttcatgtcaagagcgggacagctgaggaaagtggggtgggatgcaagtacaatttaggaccttggcattgaagccttccccttagtcaacactggcccagaccctggttcttagatgtagcaggagaggctgcctgcttctgccccctttgcttccagaaaggccttttccagctgcctcgtgtgtttcccactctgcccagaaggagtgagagggctgaaaagcggggcgggataaggccctgctttcgacagaaggcttgagacacatctccagaaagcatttaaagagcccctcctgcacataggagctgggactataaggacatggtcatcaccgtggagacggccctctgctctgaggctttagacctggcttctggatttggttctgtccctccagcctcaggcaggttctttacctttcccaggccttggtatcctccttggtaagatcatattggacttggtaccttctgcctgtggctttctaggattatgaccgacctggtttggcatcactttgtgtttagatagatgaaattgcagcctaaaggatgggaggcaaaattgtgtaggagtgctgtgtcctttgagatgacaaatgggatttaaaaattctcaccagcttcatgttggaggtggagtggaggttaagcttgctattaagacgtgatgtaatattggaacctgggtcagagaaactgattgttaagtgacttccattctcccaggacggaaataggaggctaccactgggcctgtaagggattcagtccaagtgacatcatctggttttcagcagctccggtttagaaaaacacacacacatttccgattcaagctgaactttcccgggcactggggggctggagcacccaatgactcaggatgccttagaaggaaataaaacataaagctttttatagcttggtgcttctctcccactgccctcaactctctgccaaggagtgggaggagttagctcatggaccagaactcccattaaagcccctgaactctgattaaatcaagtggcagttttcctcatgagaattatgttctttgtgtcaggaaccttaggaatgagtgtgaattgacacattcagattgtggggttttttttttctcttttgaggtggggtctcattctcactcaggctggagtgcagtggcacaatcacagctcactgcagcctccacctcccaggttcaaatgatcctcccacctcagcccccccagtagctgggactacagggatgtgctgctgtgctcagctaatttttaaatttttttatgcagacgcggtttcacatgttgcttaggctggtctcaaactcctgggctcaacaaatcctcccaccttggcctcccaaagtgttgggattacaagtgtgagccactgtgccttggctcagataattttttttttttttttttttgagacagagtcttgctctgtcactcaggctggagtgcagtggtgtgatcttggctcactgcaaccttcgcctcctgggttcaagcaattctcctgcctcagcctcctgagtagctgggactacaggcgcacaccaccacgtctggctaatttttgtatttttagtagagacggagtttcactatgttggcgaggctggttttgaactcctgacctcaggtcatctgtccgccttggcctcccaaagtgctgggattataggcatgagtcactgtacccagccccagatagtcttttcaatatcatatcttagttttattttcagttttacaaaggctaaaaggaaaatccagagtttcctctagcaatataattatttgaacattttgttacaacatgatctttagatcctggctgtatgtaagcatgtttgcttttaaactgatttttcattttgagtctttgtatacccttcaagttgtgattttttttaagttactgcattttttagcaaaagatagattttttcctgcatagacatatcagaatcaagatttgagatagattgttttaaaaatggaaaataagtaaaaaagtaattataaaatcatatcttagttaaaaggaacaggtcatataggtaaaacttcctctgagtgcaggtatccatatctggtgattctcaaacttggaatacttctaacactggacatctaatcctgtttccacaaggcagaacttgggctttctccctttcaatgacaagaagttaattaacagcccattcccatttttatttttatttttttgagatggagtcttgctctgtcgctcaggctggagtgcagtggcctgatctccactcactgcaagctccgcctcccaggttcacaccattctcctgcctcagcctcccgagtagctgggactacaggcgctcaccaccacaccctgctaattttttgtatttttagtagagacggggtttcaccgtgttagccaggatggtctcaatctcctgaccttgtgatccacccgcctcagcctccccaagtgctgagattacaggcatcagccaccgtgcctggccaacccattcccatttttacaaaagcatttttctgaatttaatagaaatgctgttgattatttaaaatttgtgatgtcaaatgacccataacctataaactatagctgagactctgtatttccttttggaatttttttctcaccatatggatgcagagatagggtttacaacatggggtcccactgtatgtgtaagttttttttttaataagcatactattctttagtatgtacaattacatgttgtatatatacgaatatattacaatcttcttactccttataactttttctcctcacgatataatttatgtaccataaaattcaccttttaaaaatacacaatttggtggtttttagtatattgacagggttgtacaaccatcaccactatataattttagaacactttcatcaccctgaaaaaccctgtacccattggcagtgattcccatcttcctttctgcctccttccccccatcccctaatccccggaaactactatattttctgtctccatggatatgcctattctagacccatataagtgaaatcatgtattcatactttttaaatcctctttttcccttttttttttttttttttttttctgagacggagtctctctctgttacccaggctagagtgcagtagcccaatcttggctcactgcaacctccccctccccggttcaagcgattctcctgcctcagcctcccaagtagctgggattacaggtgcacaccaccacacccggctaatttttgtatttttagtagagatggggttttgccatgttagccaggctggtcttgaactcttacctcaggtgatccacctgtctcggtctcccaaagtgctgggattacaggcacgagccactgcacccagcttcttttttactttttctactgaacatttctccatcgctttacattcttgaatataatttttaagatctggctgtattaatacagcatcatttagctaaccaataccctaataaaggccatttggcacattcccattattcttttcttatttctccaagaaacattccattttaagctgctttaactgtgagcacattcttactaggctggaatctgcttccttttaaccccacccattggtgctattgcagcttgtggagctaactctagacatctaatcctgtttccacaaggcagaccttggtcttcctcactgtcatggacccctcccgacttgtcaggcttaacattttgctccttttttattttttattttattttaattaattaattaattaattaattagagacagagtctcactctgtcgcccaggttggagtgcagtggcgcaatcgccactcactgcaacctctgcctcctgggttcaagtgattctcctgcctcagcctcctgagtagctgggattacaagcgcccgccaccacgcctggctaattttttgtatttttagtagagatggggtttcactatgttggccaggctggtcttgaactcctgacctcaggtgatccgcctgccttggcctcccaaagtgctgggattacaggcgtgagccactgcgcctggctggttgtgttttcgttaagtgcactggttttgagttggttgctccttcttttttaaaaccactctttgagagaaatcaacaagatgtagtgaaatttacccaggctgtgtattcaaacatctgtgttcaaatcctggaattactggcatgtgccaccacacccagctaatttttgtatttttagtagagatggggttttgccatgttggccgggctggtctcgaactcctggcctcaagtgatctgcctgcctctgccttccaaagtgttgggattacaggtatgagccaccatgcctggcctacaacatataccaactttaatatgtaagaactgatgcaggcatagcatgaaaatgcatcaagtaagaattaacaatggtaagaataagaaatccattattatagagattttaatatacttctggtaattgagaaatcaaccagacaatagaagatttgaaccacagaattaacaagtttgatctcttgtatatacatagaacattagacccagcaagtagagaatgcacatttgaaatattaaatattaatcagcactattattaatcacaaattaataaacaatataactatgtggttataatatataattgtaaatacaaatatataattatataaacaacaaattaatgatattagtgtaataaagttactaacaaatatcaattaagaagatattaattaaatagataattaggattgactacctgttagatcatagggtaaatctcaacaactactttaaaaatcctatcatattgacctagaaaataattccaaaaatacaactttaaaaataactgtttagaaaattaaaatccacttctaataacacatgggtaagaagaaatcataacgaaaatctagaaaatatttaggattgaatgaaagaaaattctacatttcaaaatgaggtacaacttaagcagtacttagaaatgtatagccttggccgggtgtggcggctcatgcctgtaatcccagcactttgggaggccaaggtgggtggatcacctgaggtcaggagttcgagaccagcctggccaacaaggtgaaaccttgtttctactcaaaacacaaaaattagctgggtgtggtggcaggcacctgtagtcccagctactcaggaggctgaggcatgagaatcgcttgaacctgggcagtggaggttgcagtgatctgagattgtgccgctgctctccagcctgggcaacagagcaagactccatctaaaaaaaaaaatttatagccttaaaatgcttataatggaaaagtagaaaggctaaaaataaataagctaagcatccaacttaggctagcaaaagaatagaataagctcaaagaaagtagaaggaaagtatcaaggataaccacagaaattaatgagaaacaaaacaaagaagatcgacacagacaaaaagtgggctcttttacaaaaagcatggcagtttgtcaaaaaaattaaacatggaattaccatatgatccagcaattccaattctggttacagacccaaaagaattgaaagcagggacttaaatagatatttgtacacttatattcatagcaacatttttcgaaataggcaaaggtggaagcacccaaatgtccactgacggaaggaaagataaaatatggtacagacatagaagagaatattattcagcctttaaaagtaagggaattctgacacatgctacaatgcggatgaatcttgaagacaggctaagtgaaataagccaggcacaacaaaacaaatactgtatgattccatttatatgaagtacttagggtagtgaaattcacacagaaagtagaatggatggttgccacagacaagggaatgaggcgttattgtttgatgggtatagagtttcagttttgtagaatgaaaaacttctgggccggctgcagtggctcaaacctgtaatcccagcactttgggaggctggggtgggtggatcacctgaggtcaagagttcaagaccagcctggccaacacagtgaaaccctgtctctactagaaatacaaaaattagccaagcatggtggcacatgcctgtagtcccagctacttgggaggctgaggtgggagaatcgcttgaacccaggaggcagaagttgcagtgagccaagatcacaccactgcacaccagtctgggtgacaagagacaaaaacaaaaacaaaaaaaagcaaacttgtggagatggatggtggtgatggctgcacaacagtgtgaatatacttaatgtcaccgagctgtatacttaacaatggttaaaatgattaattttatatgttttaccacaattttttttaaagtcaagaaagtgatgagaacattacagaaacctaatgttatcctggaacctgcttatattgcaggcgatgtttcatgtatcattgattattttctcctattattgcattcactcatatgctgtttaattattatagctttaaaataaaatctaatttctggtgtttcaagtgaaaaaaagattattagacaaacttcagggagtgctgattttttaaaaaatggttctttttgtttgtttgttttagagacagggtcttgttctgtcatccaggctggagtgcagtagtgcaatcataaaccagagattttttttttaagtgtattattaaaaagttgatgtggccaagcgcagtggctcatgcctgtaatcccagcacgatgggatgctgatgtgggagaatagcttgaggccaggagtttgagactagcctgggcaatatagctacaccccctctgtgtaaaaaaaaaaataagaaaagaaaagaaaagattgatgctagtaaatatgaagatgcataaaatggacaatttcctaaatttcctagaaaatggactcaagtagaaatcgaaaatttaaaataaactgttcaagaaattgaagcagtagtttaaagtatatgtatttgtgatggatgcttataaaatgatgttactttcccactgaatgagggaaatctttgtcccataatttttttttttttttttttttgatatggagtctcactgtgtcgcccaggctggagtgcagtggcgcgatcttggcttaccgcaacctccgcctcccaggttcaaccaattctcccacctcagcctcccaagtagctgggattacaggcgcgtgctaacacacccagctattttttttttttttgtatttttagtagagacagggttttgccatgttgcccagactggtcttgaatgcctggcctcaagtgatccacccaccttggcctcccaaagggctgggattataagcatgagccactgcacctggccaactgggccattctttctgccatccccatccaggtgccagacatgtaagcgaggccattttggatcctctagacgaggtcattcaccagctgaataacaccaggtagcctcagttgacctacacagagtggaagaaccatccagctgaactctgcttgaattcttcacccacaaaatcacgagataaaataaaatagtggttgttttaagctccataccatatggagtcctctgttttgaactaatagataaagcactactgaaaacaaaacaattatcccagagaatttaaaaaaaatcacactgtgactttttacctattcttgataaattcttccagaaaaatagaatttaaaaaaaagagcttatattaagaccaattaccacacaagaacagaagaaggaaaaaaaattacaggctggtcttatgtacatagatgcaaaaatatacaaatctaaatattaaacttaatttagcagtgcattaaataaaacatatcatgaccatgttggttttcacccaaccattcaacgcttatttcagtggaagaattgagtcccatgaggggaagaacaggctaacaaccaagcccatggaagggcagatgtcctgtggcttcttcggcttttctggaactgaggactcccactcctccatcaagactctgtctctcttgtctcgtgccttgccttccttcccatttcctgcagtctggcttttccctacagcaggaaacgtggccagcacgatttctaagctttacatcctacagctttagccaggcagagataatctggctcagttccagttgcaacacttgtcatttttattatttttttagagatgaggtctcactgtgttgctctggctggcctcaaactcctgggttcaagcactcctcccacctcagcatccctaatagctgggactacaggcgcacgcccccacacctagttccagtttcatttttgagaaaggattctggtacaatttagctaagctgcccacccttggaccaatcaactgtaacaggaattggagtctagagaaaggactgtgtatcagttttcctcacgggtttgggggaggtggggaggtcagcaagttgatggcagggttcggtcctggaggaatggtcctggctggagagtcaaggcagaacccaagaggctttaatgtaatgttgttctgattgtattcttatagagtctagcatatagcaaaatttaatacattatagcttttttattttaaaatattacagtataattgcctttctcccttgtttttttgtttttttgttttttttttgagatggagtctcactctgttgcccaggctggagtccagtggcaagatctcagctcactgcgacctctgcctcccgggttcaagcaattctcctgcctcagcctcctgagtagctgggactacaggtatgtgccaccacgcccagctgattttttgtgtttttagtagagatggggtttcactgggctagccaggatggtcttgatctcctgacctcacgatccacccacctcagcctcccaaagtgctgggattacaggagtgagccaccatgcctggcccattgtttttatttatttgtttgtttatttattttttatagaggagggatctcactatgttgcccagactggtctcgaactcccgggctaaagtgatcctcctgcctctgcctcccaaaatgctgggattacaggcgtgagccactgtgcccagcctctcccttgtttttttaaaaactgtgacgaaattcatataagataaaattaaccattttaaagcgtacaatgcaatggcatttagtacattcaaagtgctgtacgaccaccacctctatctagttccaaaacatttgcatcacccaaaagaaacccctgtgctcattaccgctcgctccccattcccccttcctcccagcccctggcaaccaccaatttgtgttctgcctctatggaattacctactcggaaaatttcatataaatggaatcataccatatgtggtttttgtctggcttttttcacttagcatggtgttttcaaggtttatccacattgtagcaggtatcaggattttgttcctctttatggctgaataatattccactgtctggacataccacattttgtttacccattcat

SEQ ID NO: 3172 - DNA, 4207 bp, Homo sapiens
cgctccggcagtggtgctgggagtgtcgtggacgccgtgccgttactcgtagtcaggcggcggcgcaggcggcggcggcggcatagcgcacagcgcgccttagcagcagcagcagcagcagcagcatcggaggtacccccgccgtcgcagcccccgcgctggtgcagccaccctcgctccctctgctcttcctcccttcgctcgcaccatggctgatcagctgaccgaagaacagattgctgaattcaaggaagccttctccctatttgataaagatggcgatggcaccatcacaacaaaggaacttggaactgtcatgaggtcactgggtcagaacccaacagaagctgaattgcaggatatgatcaatgaagtggatgctgatggtaatggcaccattgacttccccgaatttttgactatgatggctagaaaaatgaaagatacagatagtgaagaagaaatccgtgaggcattccgagtctttgacaaggatggcaatggttatatcagtgcagcagaactacgtcacgtcatgacaaacttaggagaaaaactaacagatgaagaagtagatgaaatgatcagagaagcagatattgatggagacggacaagtcaactatgaagaattcgtacagatgatgactgcaaaatgaagacctactttcaactcctttttcccccctctagaagaatcaaattgaatcttttacttacctcttgcaaaaaaaagaaaaaagaaaaaagttcatttattcattctgtttctatatagcaaaactgaatgtcaaaagtaccttctgtccacacacacaaaatctgcatgtattggttggtggtcctgtcccctaaagatcaagctacacatcagttttacaatataaatacttgtactaccttaatgataaggactccttaaagttccatttgctaatgattaatacactgtttgggctggccagtttttcatgcatgcagcttgacgattgagcacagtcaggcctttgtattaaaaatgaaaaatgaaaaaacaaattcaaaacctattcaaatgggttctagttcaatttgtttagtataaattgtcatagctggtttactgaaaacaaacacatttaaaattggtttacctcaggatgacgtgcagaaaaatgggtgaaggataaaccgttgagacgtggccccactggtaggatggtcctcttgtacttcgtgtgctccgacccatggtgacgatgacacaccctggtggcatgcccgtgtatgttggtttagcgttgtctgcattgttctagagtgaaacaggtgtcaggctgtcactgttcacacaaatttttaataagaaacatttaccaagggagcatctttggactctctgtttttaaaaccttctgaaccatgacttggagccggcagagtaggctgtggctgtggacttcagcacaaccatcaacattgctgttcaaagaaattacagtttacgtccattccaagttgtaaatgctagtcttttttttttttttttccaataaaaagaccattaacttaaagtggtgttaaatgctttgtaaagctgagatctaaatggggacaaggcaggtggaggggaggccagtgtacatgtaaatgcccacagcccagcattgggtttccctcccaaggccccagcaccaacctctgagcccaagaccttgcctgaaaacaagcagataccgattgcttcatcctatttatggacatgtaggtctagttgcattttcactggggggaggggggaaggtgaattatggtaacttttaatgatctattcaggcagtagagctcttaaggaaaaaaaaaacccactttctctcaagcatgtatttaggggttgttctcaattgtgctgctgattacctgtcttatgtaactacttgagaccatctgcaagagacatgatttagtgtgtctgtaattcaatcttcgctgtgtgtggtagaagcagtagtcacttttgtaagccagtctcttcatgcctaaaagacactaccagtcacctttgattcgcgacttttaatttatgattatacttagcctcctcctcctttttttttttttcccaagttgacttgactttgcttttttccccccaagtagaactaatgctagcttccagcttgaaagtaaaactccagtgtggagtgaattttgtgtctaattataaacctgtaaccaaaactcagacatctggtactggtctttgcattgagattggtccctgtaaaaccccctttaaaagcatattgcatttagtacagagctcttttttgaaatgaaggctggagatgtgcatttttcacggtgttaactggttgtatcttattagcaaggagattggggttttgagtgtttgcgtgggtggtttcaatttgccagggaacagtggcaggctgctagcaaggcagtgagaagctcttggcagccaaatgggtgcattcagggctgatttatagagacccttggcttctccttctcctactccctgtctttctggcattttgtagcttgttagattttctgccagaggggtgggtcagagcagtggaggggagacatcgcccatgtgcttctgctactggtccttgggctgggtggttggtagaggagatgttgacactatgagctaagggttggcttttgtaattacctgaatctgaaaggaatgcctaaggttaccttggggtttctcttctggtgagatagggttcctggtttgagtaagttaatgtcctggatatttcttgtggcagggggtggtcaaagagcctgattgctgacccagtctcaggcctgtggtcgatgacctctcggtagtttcaaagggggctggagggggatatttgacttgttttttcgaaatgtagccttctaaccctcaagtctttagaagctgggtggactcttagtggtcctgcagcgtatcctaaaagactacctttgaaacaggattcttgtatggccaggatcgtgtctgggaaccagaaaccctacaccctccccctccagggaatgctgagttccagttttgagcagaggtgaggcagaatccactgtagccttccgccctggtatttggggggatgaccagcccaggcgttgggtgttagtctgcatgagtttgtgagaggaaatagctgggtgtcctggcagtgcccttgaagttggttaggaccttcctgtaaactcttgcccctacttctaactactctataaatatatacatatatttatatataaagtgattagttgaactggcatcctgctttagcctgagacttgccataagaaactgctgagtacttggcaaaccctttcatagttttgttctccatctgtttggggtaggtgttgagcgaggcaaatggatctcgatatttcagatgggcttttgatgcactgttgccaaggaaggctttttctgattttttgacaaatgaatttttgcacactttcattggtgtctttcggcaacttacacacattgaaaatgagctattgtacatatttttatattctctttataaatgcatgtctgattgtacttgtaacaatattgtaatgaacggctgtgcagtaggcccagcgctgctgtgtctcgtcagaggaatagcttaccacgaacccctcagcatactgggaatctcttcctgaacaacgaatgtaaatttggtcaagtctactcttccgttcattcaattattttaagcatttgaattatttattgtatatcctaaatatatttctcctttggcagtgactagatttccactaatgtgtcttaatctatccctccagctggcagttactgtttttttaatcccctgaagttgtcctgtaggagacagaaattctttgctgtctgtatcccttggagtaagaaggtagtggcatgggtggagtgtgtgttctttctccaaatctattatgatgtttattaaacacttctgtagcaaagatggtggtagttcttttgttactgaagttgcccttcaccatggctatttgaaaaggagatgtacttggacgtttctgtaaatcttgagataaactgtttggagatttaaccacctctctgatgggggaccaactctatggaaattgtaaatacgttttatttataaacctggcactgtattcaataaacatttctgcagcctttcatctct

SEQ ID NO: 3173 - protein, 149 aa, Homo sapiens [sequence omitted]

SEQ ID NO: 3174 - DNA, 1779 bp, Homo sapiens
cgctccggcagtggtgctgggagtgtcgtggacgccgtgccgttactcgtagtcaggcggcggcgcaggcggcggcggcggcatagcgcacagcgcgccttagcagcagcagcagcagcagcagcatcggaggtacccccgccgtcgcagcccccgcgctggtgcagccaccctcgctccctctgctcttcctcccttcgctcgcaccatggctgatcagctgaccgaagaacagattgctgaattcaaggaagccttctccctatttgataaagatggcgatggcaccatcacaacaaaggaacttggaactgtcatgaggtcactgggtcagaacccaacagaagctgaattgcaggatatgatcaatgaagtggatgctgatggtaatggcaccattgacttccccgaatttttgactatgatggctagaaaaatgaaagatacagatagtgaagaagaaatccgtgaggcattccgagtctttgacaaggatggcaatggttatatcagtgcagcagaactacgtcacgtcatgacaaacttaggagaaaaactaacagatgaagaagtagatgaaatgatcagagaagcagatattgatggagacggacaagtcaactatgaagaattcgtacagatgatgactgcaaaatgaagacctactttcaactcctttttcccccctctagaagaatcaaattgaatcttttacttacctcttgcaaaaaaaagaaaaaagaaaaaagttcatttattcattctgtttctatatagcaaaactgaatgtcaaaagtaccttctgtccacacacacaaaatctgcatgtattggttggtggtcctgtcccctaaagatcaagctacacatcagttttacaatataaatacttgtactaccttaatgataaggactccttaaagttccatttgctaatgattaatacactgtttgggctggccagtttttcatgcatgcagcttgacgattgagcacagtcaggcctttgtattaaaaatgaaaaatgaaaaaacaaattcaaaacctattcaaatgggttctagttcaatttgtttagtataaattgtcatagctggtttactgaaaacaaacacatttaaaattggtttacctcaggatgacgtggtcctcttgtacttcgtgtgctccgacccatggtgacgatgacacaccctggtggcatgcccgtgtatgttggtttagcgttgtctgcattgttctagagtgaaacaggtgtcaggctgtcactgttcacacaaatttttaataagaaacatttaccaagggagcatctttggactctctgtttttaaaaccttctgaaccatgacttggagccggcagagtaggctgtggctgtggacttcagcacaaccatcaacattgctgttcaaagaaattacagtttacgtccattccaagttgtaaatgctagtcttttttttttttttttccaataaaaagaccattaacttaaagtggtgttaaatgctttgtaaagctgagatctaaatggggacaaggcaggtggaggggaggccagtgtacatgtaaatgcccacagcccagcattgggtttccctcccaaggccccagcaccaacctctgagcccaagaccttgcctgaaaacaagcagataccgattgcttcatcctatttatggacatgtaggtctagttgcattttcactggggggaggggggaaggtgaattatggtaacttttaatgatctattcaggcagtagagctcttaagg

SEQ ID NO: 3175 - protein, 149 aa, Homo sapiens [sequence omitted]

SEQ ID NO: 3176 - DNA, 102711 bp, Mus musculus
  misc_feature (1)...(102711): n = A, C, G, or T/U
atctttaaaaaaaaaaaaagaacaacaaacaaaaaagattttccatttattgtgtgtgtatgtgtatacaaacatgtattccagcatgggtgaaagtcagagaacggttcttgccttcaccatgtggttcctggggattaaacacttacccaccctgccagagtaattaagtcatcatatttaaatgtgccttggatggacggtatggagagaagctatttattggaatataacaatggcccttagtctccatagagtcatggcttccatgtgatcaacaaggtaactgtccacatttctgtcaatgttctgtctcctaaaaccatatcaggaagaatcagcataaataagcaccaattacagcctttaagactttctttatccggctctccaaacctccccattgccaccaggggtgtgtgtgtaccagcaaccagccctgtgtatcattccacaggtgccgttcactttgtttttttcttttcttttcttttcttttcttttcttttcttttcttttctttctttctttttttttttttttttttttttttttttgggtttgttttttcgagacagggtttctctgtgtagccctggctgtcctggaactcactctgtagaccaggctggcttcgaactcagaaaaacgcctgtctctgccttccaagtgctgggattaaaggcgtgcaccaccaccgcccggctcactttgctttttgagaccccatctctcattttgtttaaagctcaggaagccttgctggctaggaagcctcagagacctacctgtctgcttttgcccggggctgggatgagagggatatgtcggtgtacccagcttcctcatgggttccagggtcaaactcacatcctcatgcttgtgtggcaagcactttactgactgagctctctctccagccctctccaaactttcctctccagcagaccaactcttaaagcatgtcatcacatgtagtcattgcaaccactcctctgggacaaaatttctttgttagctttccaaccttgtgacaagaagccctgggatattggacttataagaagaaagatgcactgtggctcggtgtcagtggtctctgtccatggccccgtgcttgcttgctttggttctggtgcaacatttaacagcatggcagaaacatgtggcagaggaagtgctcacctagtagccagaaaacaggaaaaagatagggctagtatcctgttgtggctagctttaatggctagctctctctcattaggctctacctctttatgttaatcattttcttactgctgtgacaaaagtacctgggcaaaagcaacttaagaagtaaagggtttcttctggcttatagttcaatggcagtgtcccaccacagtgcggatggcatggtagcaagtgagggtgtaggctggtcccattacatctctagtcaggaagtggaaagtgaacagtaagcagggccaagctgtaacacctcaaggcttacactccagtggccccttccccagtattcccctaaaggagcttcctaaatgacacagccagcttggggccagatgctcaaacccatgagcctgggtacatagcggagggagtgcatctcacactcggatcacaactcctaaggatgctattgctacccaatagccaggcaaccaagccttcagtacaagattttggagctctgatctaacttgggaaggtctgaattctggcttcgtctttgacttgtctcacttattgaagaagatttgaaagtgacactggtgaagtatttctcaactgatcatgggtttgctttccattttcctggttttccatctacttctggaaatgtcttggcaaatttcagtataccaggacaatactggaacagctccattgtttggaaggatgatctcctatttgaagcctgctgacttgatccagtttcatctttctgagaacctcttaagtccacaagcatctgactaactcaccagctaggagatgctcttgtctgaccctggctacaacagcaaaatatgccaagtttctcctcacagagctcacatttctttggcctttggcgttagctgtagacttcattttcaaaaggatatttagaagagtttttggtctttgctctttttcattgtgagcctaagaccacagtgaaacaattgagaaagattacctgtaacactaactgaaatcatgctgtttcgtctgttgctgctcgaggccaaactctacccccactccgacccctttttttcattttcttttcttttcttttcttttctttttttttttttttacattcatttcttttgggagatggggctgggaagaaggtccctgtctgtcatagcacatatgtagaggtcagaggacaacttgcaggagtcggttctttcctcctgccatgtgcttcccaggaactgaacccaggttctcaggcttggcagcaagcaccttacccattaagccatcttgctggctccgttacctttgttttgtttttgtttatggaacataacaattatacacagtgggcttcattacacttctctgtaatatattgtgatcttattaatttcttgatactgtgccttattcctcccactccagctgcatggcccagtaagttacagtgaggtgctcatgggaacccaggcacctcatcagttgaagaaaatgtcttgccttccttagcagagttaattgctatagatacttgggaggggtgggagaccggaggtgggggtgacgcccagtctgtggctgagcattgcactgccacttgttctcaccacaccgaccagttacgtacgagccactgtagtgcccactgcaacaaacaaacttcccaacaaacaaaaccaacactcatgcctttggtctatttggagttgttttattttatgcagggtaagacatatagatctaatatcattctcctgtctacagacataatttttttttaaagatttatttattattatatgtcagtacactgcagctgtcttcagacaccccagaagagggcatcagatcccatcacagatggttgtgagccaccatgtgggttctggcaattgaacgcaggaccttcggaagatcagtcagtgctcttaaccgctgagccacctctccagccccagacataatttatagtaccatttgttggaagaagagacaatttgttcaatttgtatttttggcatttttgacaaaaattaggtggtggtagttggacttatatctcagtcctttgttctcttccacaggagtgttcctttcccacctgtgtgtgtgtgtgtctgtagtataacttggagtcaggattgctctgatgtgttatgtgtttccatatgaatttaagattcaaatttcatcatctcctaactgggctagctaaaactggtctctttgtgttcattttccattaaaaaatgagaaccagattaccaaaattaccactaccaccaaaataacccctctgattccttgattcataaagtccctatactttcctctgttcagtgcccgcttcccttgtctgtcccactcgtgccacgttagaggggcgagtgctaagctagctgtcctttatctggggctttccacaagttactcctctgtgtttaggatcattccctgatacttgctcagttggacctttgtcactcaaatcttgatgcaaatgccctttttttaaaaaaaaaaaattacctattctgtttcttgccccaaccccaaccccacacacagtcaaaacaatccctggcttatcatctttttcttattcattgtcacctggcctccaacattagaaataaatcattaaagccagatggtagtgcacaggtaactctagggattgaagcagaaggattttgagttgtggcctgggctacctagaaagaccctatacccttaaaaggatataactactgtgtgtgtgtgtgtgtgtgtgtgtattcatattcatataatacatatatttatataacatatgaagaatataattcactgctctgtctggaccatctaaaatggtgtctagcaacaagtagcccttcaaatattgggtgtgtgtgtccatatgtgtggatgtacatggagtctagggattggtgcttgatgtcgtcatcattaggatttccatccagccttattttttgaagatactctatcacaatctggactttaccaattcctctagactggtggtcagcaaggctcaagagatcttcctgtttgcacccccccagtgctgagattgtaggcgtgcaccgtcgtgcctatcccagcttcttatattaatgctgaggatccaaattgaggtccttatttacttgtgccataagcacttttcagactgggccttgtctccactatctcctttaagcctttgttaggaaaaaaaaaaatctctaagagagtgtctctttgttgcaagagtctgttgtagagatgggaatgaagaaagtcttcactttggagcagtagtgaattttaagatgtaatcatgctcacttttagtacagcatttccttttggtggcttactttagatttcctcaaaatggagctatggagtggctttagtttacatttttattttaaagttaaatatcactggaagtccagttgaaatgtataatgtggaggaggatttagggcttgcttactgtttcagagggttagttcattctcatgacaggaagcacgcatggctctgagagctcacatctcataggtaagctgtaggcagagagagagagagagcaagactgtgcctggctggcttagacttcaaaagttccaccccaggggcacacctcctccaaccaggtacgtctatcaatattccctaagcagcttaccaactgggaaccaaatatttaaaatatgagcctcgggggccattctcattcaactaccatagttgtatgtttattttttgggacaagctgtaatatttggtggattctggagctgtctcctcaggtcttcccagccagccctgtcagacatgtaccttgtacagttaggggcctaagtcctggactagaccaagttgtttaacagaagacactatgtgagggttttgttttgttaattattttcgaggtgatttttgagttttagctggtttgtttaggaagaggacttggcaggcttttgacacacacactaacatgagctaccatcagttgtggtttttgcgtgccatgcatttcctcatcttcacagcatccccacagagtacgtgctgtcttcctcgctgtggtatgtggtggagcttgaggctttcctagcctttaagaatgagccttgaggtttctcaatagagagcaacatactagcattctgaatcctccttactgtaaccagtgtggaggaaggtgaagcatttcaagttaggggaccaaggagaactgaagtggaggtacacagaatacagagccgagtcagtgaggagaccaccctgtgcagcctccaggttggcagcagtgagaggcagacgaggtagagcagtgaggctgtgcaagctgaccgcccagctgcagagctgagacttcactgaaaaggcatcactgagtggtgcagggggtggaggagggcggggagaagcagggtcttaattagaactaaaaaagcctagaaagaagcaggcatctgaggacactcccaagcgcttcttaccacgcagtctctactcattggaaacacccctggttgggccatgggatgggattggtatttttagtcatgactgatttccgtttgtgtctcctgttttgtctctacacagtgcggtagtgaatgttcatatctgtaaatgtcaggacagctttctcgttttacttgattggcacatcagactctgttcatatgctcagttcttattttgtttcacgtacatcatggctgtgtgcccacaacctaaaaatgtgaaagggaaaacagttgccaagtgaagctggtaggacatgggtttgaggctccgcttagtctcttgtgagtgtgagccccaaagaccagaattttgctttcttggaaaattattgttcatttcactgaagaaaccatgttgcttccaaaactctgggtgtttgtgttaccctaaggtcacttgtttaaaatattctcagttagctgttgagaattaccagggacacagtaacatttgtactgtttgtgttgtacatagtgtgtcaggtttctttctctagagaagcctagtcggccgttgtccagtgactgaggaagcgtgctctgccatgaccacaggaagacagaggactgcatccattggggcagctctggtggtctatagaatggagagaggcccagcactgacagcatctgccagaggccagatgtcttccgaggatgcattccagatgaataggctcctccacctttggcaaaagcctttctatttttatataaggcatttgttttatttagggttacgtggaagtgctaacttaaagagtaagttgttgaaaatgagaagttaatatgtagttattctcatttacaaagggaatctaagtctcaaagcaggagtatgtattttctgttacctccagtctttgacagatgccttggagtgaccatttgtgttatttaacatttnnnnnnnnnnnnnnnnnnnngtttttaacattttatggggctgcagagatggctcagtggttaagagctctgactacttttccagaggtcctgagttcaatccccagcaaccacatggtggctcacaaccatctgcaataggatcggatgccctcttttggtgtgtctgaagacagcaagagtgttctcacatacattaaacaaacaacaaacagaggaaattagagctgttagaagtcttggcaactcacttcagtctcatttccacactttggagtttgcagtaaccatgtggtcaagaacctgcctaatctgagaggcggactcctcttcccgttggtcccaacagttgtcagctcaggtttttacctgctttcttcctgactgtatcagaacagtttaagcctttaaaggtctcttgcttgctgtaaatctggtaattataacattcaggtgagctgcataatgtaacataaaagggcatagtgtcccagccctgccacagtagttactttacttatttctatgaccaaagaaagacctgccaagaggtcacttaaaggaagaagaattccttttgcctcgtttgagggtatacagtccatcatggcagagaaggcagttctccatcagtaggaacatgtgggtagggctctaacagagtagaacaggaagcagagccaggctgtaaacctcagagtcttccctaaacagcccactctctccagctaggtcccacctccaaaggctctgcatctccccagggcagtgccatcatctggagggaaagcattcaaacccaagccagcacagttcatgtacaaaccgtagcacacctttcttagagccactagctgcccccatctattgaataaatcctcttctggagacagcttgaactatggttcattggtattaagacacaagtagaacttgttaaatagacaaaccagtatctgagccattgctcttcacttatagctgtgtgatgttgggaacattgtacttatcatattgggctttgttttttattgttaacttaaggatcttggacagagatgtctaaaatgaacttgctagtaggatttggtttcttactatttgtttgtaccaactcttgccaggaccttaggtatagcccagaattgtataaccagccctccaccagtgagttatagatggaaaacagccacagggcctagaagttctgtgcccctgtccttccacttgtacagacttgttattctattctattaaaacaaggtaacaagtatttatatagactttatgttattgttaaatagtattaggtattatatgctatctagtgatgagttaaagcgtataaaatgtatatagatatatgcaaatactatagcattttacataagtgacttgagcatgtgtggacttatctattcagagacccaatatctcacagataccaaatgataaataaatgcatctcccttgacctgggactcacgggacagaaattcctcccacttgcctccacatgaatgaccaggcagatcactcctgaagaaggtgctgccgcaacccccgcccctccccactccccaaaactgggtttctctttgtgaccctagctgttctgaaattcacaaactggactgacctcgaacttacgagttttccctgcttctgcctcctgagtgctgggattaaaagtatataccaccacccccagctgttcagtgagagaatatcctgtgagacagtaaagatgatgcagaaccattatttaatgtatggtttataagcacacactttgttggtgcctgtgtgagatacacgggctgtgtccatgttactacagctttacctagggggtatctggcttgccagcaattagcaccaatagaacaagtaggggttctgggatttaaagccaggctgtttaatggctttgaatgtcctatgttttctgatacaatgtgattctatcaaaaagctgttaccccaaaaggtcacacccagatgcttgtgagacatactggaaaggtgtttcagatcagcttggttggtgcttgtgttatgtaaggaggagaccccaggaccgtagattttcctcactcatctgcctgttccattgggtctggtcattgcatttccctgaactgagttctgggctcttctttctctttaagacaaagatagccacacaaagagcttcactttaacccagagtacctttgtgactgaataactgattttttttcctcctggaccagacacaaagggtaggccaaaggaggttctttcagtaagccccctttgagtatgccccttttgtcattgctatcccaggagctagaaatacagagcttaaggatcacccctgctgtgaggggactgtgttgaagaaacagtatgacataatccagggaggttacttagtcttacagacatgttaaaataaggtggcatcaaaatcagatttgtggaagtactcaatagatttttaggacagagtgggataggaagtccagttactgatgtgagagagacagaaatgctgaagacagtagatgtgaagagggtctgcctccagagcacaattgacaactgatttttttttttttttttgtaaaaagttgagtgactcacaagtttttatttgagatttttctcccatattttataaagatttgcaatccaaatgctgcacatttcccttcatgtcaggtttcaggaggcaccctcagtacatttgccagatctcgccagcctgagctttacaaatgggtaaacattcctctttctttttggctgacatctcattgcctttttcttttattttgaaagtattacagcatttttatacttcaaggaattgacattatacacgtagtaaatgaatagtcaagtaaaggagactgctaatcatggctcatactagccgtggcatgttggtgacgctgaactttgactgtggcgctggagcaacgtgtgaacctgcgctagtttgacagtagggcagcacactggatttggaagaattgtttcgtgctctggctgtccttgaaaggtagcccagctatcacctgtatgatgctcatttacaacatgggttttgactgatctttgtagcagcaacagccttgggaagatgaggtcattaggctgatcacaatggagcaggtctcattctcattgcagaagccccaccccagcactctgcacaaattgtggaggtgggatgtgttacttgatttacccaggatcctaagcgcaccctgggttcgacttctctagactaatccagctcccagtctggagtctaagcatccactgcattaatcaggcttgctggaatgatcacatggttttcttgctgcctcccctgttagctgccgcttgtcagcagctggcggagctggaggctgcagggcccccgtctgcagagagccttttacttcagaatattgggggtgtggaaacctcacctctttttttctgcactttgtagcatctgactgactaaatggttgtcctcggtaccaaaaaggctgccatacaatccaaggaaattgcctctgactaggtcatgttcgcatttgaagaattcaggtatgttctgggttttctctcagtctaatgctgggtttttgtcctcgctacgtttttgctgtgtaatgactgcttaggctctgactggctctacacacaaaaaggggttcttgtctgcattcggtagggtttatcgaggtggtgagggtcagggatgtttgctgcatggaagtgcagcatggataattggtttgatcttgtgtagattcgtagaggaccccacctcctgcattctgttagctgcttttgctggtgtagagttatgaatacagaatcgcaactgtgtctccagaacgagtcttttgctatcttttgttttcttcctttgtcaaactcatgcagtctactgctgctttacaaaaaagggaactgtagcagagagggtgaaaaattctgcaaatggatctgcatggctggattggatttggctctggttttctgttattaaagccacagctaggctgttttctgggacgtgccttgacaacgtttgttagcagggtgcttctttccggggctcttctgctgttgtcatcattagtgtttcagattagatcctttgtgacttcttccttctgctcctccatcgcttcccggggaagctatccgagtcggatggtgggaagggatgtgccagcagagatagttcctagggaatgagaataaaggaggcagagcggaggcagtcagaccattctgtgcccatttctgtggacaatgtgtgtgtatgtctgtgtctgtgtgtgtctgtgtctgacctctgacagctcctcctttttcctgtgaaatttccatgtgtcttagaactgggcataaataccatgttgattgacagagagtgattataccggacctcagctttaccttgacaggcagttttttgtttttttttttttttgggtttttttttttttttttttttttttttgggggccttctaaatgttactgcaatagacattgaacctgtaagagaagagccagccagtagatggaggatcattagatttccttatagaaaagtaagcttcaaagagtgtctccaccctttactctaaacttgatgctgtgggttcgggaagttttcctttgtttcagaacatgtgtctgcattattctgaattgagtggacttggaaaaaggaaagccttttcatgtggcaacatgccccaatgacatgaggcctgtccccttgcaggatgcccacactcagtactttagaatagctctattagagaactaattatttagtgtctggtgtgatatagtagatgcacttatgaatcaggaatcctgtgttcttgtcttggattctagattagctttccatgtcttgtgagagtcacttaagttctgacctagtacgatgagttagcatgtaaaggtgcttgcagctaagactgagaacctgagtttgaaccctggcacccacgtgctggaaggagagaaccgactcctacaagttgttctctgacctcacacagatgcacacacatctcagtaaatgtaatggtgttctaagagtcatggagttgtagaagttataaaagctgctgtgatggcttgaaggaggatgatccctacaggctcatatagtcgaatctttgggaacgattagaagtgtggtggccttgttgggagaagtgtgccactggggggtaagctttgaggtttttgaagcccatgctattcttttaacttgtgtctcaagctctcagttcctgctccaatgccatgtctgtctgttgccatgctggtcatgctagtcatgaaactataagcccccaataaactctttcttctttaaatgccttggtcatagtatcttatcatagcaatggaaaatcactaagacagttgtagtttgtgaagctcagattttgttgttagcatttggatacagtcagccttcattgcctctttgagcagaatttaaagtctcattacgatttgtggttaagaatgaaggctgtagagcaacggaactgttctcaccatgataggctctgaccccaacgccaagaaagacctggtggaagggtctaaggtaaaggcagctaccctgattagctgagaacatggagatggcattatgaaaagtagaccagagtcaggagtatgatcttccctccttcaggattctgcccagagtggttgcagagaatcttactaggtatagcttcacagtgttagaccgtgaccttcttcagtccaggagctgtgtacctgtgactaggaaatggtggcaggggaccatagaggagtgtagctgtttagtttagtttagtttaagggtggtctcgagattttagaatcccagaaagcttattggtaattctgtggcatcttaaataagaaattcttacagaacttgaatcaatgtttctaatgaattctcaagtgattttggtactacaggttgcgggagcaggcatttagatccattgagttaggaaaggtagattgatttgactatcacagagataagaaattccaggcaaagacagggagggggaatcggtacaaaagacatcaggcagttcaagttcaaccctcttttagcatccacagggtgatggttccagaacttccctaaggacaccgtccatgatggaaagtgtgtgcatgtcacaatgaacatgctcctgaatgctgcaaatcaccttcaggttacttatggtgccaactgcatgtaaatgctgtatacatagttgctggactatatgtccaaagaaaccagcctgtgcatgctctgtaaagatgcagactctgccgtgtcccctctcctttccctgcctcctctatttttgaggcagggtctcatgttgagcccaggttggcctcaaacttgctatgtagccaagatgaccttgaactctgatgttcctgcatccatctctcaagtgcctggattatagacttgtgccactacactcagcttcccatatctgtgatctgattttttttttatcctcataacctgctatacaagcaggtgatcagcagtgtgtgcttatgaggttaaagcacggccaggtcagtttgacactccaccctccctctgtagaggtcctgatgtacagtggctgataaccctgctactgccatgtatcacctctgtggacctagcaagtagctagatctttcttagtgtcaattccctcagctggaaaatggggatagccattcttgccaagaagatctttactgctgtcaagatgagatgggataatataaactacaaatcatatcagttccttctacatgaagatagagggagaagaggaccctggggcaaatccaccagagtgtctacatgtgcttttaagcctcatgtatgcatacatttctccacacacactgcagcactgagggcacaagggccacattcacctcaaaaaaaaaaaaaaggaatctaattttgatgcaaaatgtttgcacgccatcctccttattggactgtgagttccttcagagctttggtgaatgttatctgtcttaaactagggctaaactactggcagttgacacaatttatttaaccaagattctgagacaaataaataacaagccagccatgtggttatcttggtgccggcctgagatctgcctgtgttgtggtatgtgctagagctcacgaacatgcagagccatgacatatctcagcacagcaccttatgttcaggggcatatagggagtttaccattgtctgcaccctacacctagagttacaagatcctaagagctggaaaggtgggcaggcatctcccaggggttatagaattttgcctgccatagcaatataacaccaggcaaactgctgtagcttgctgatgtagtaatcatgggacattgaaatgtttttgccttaaaaaaagtattagagacctaggaagatagcaagtaaagtacttgctggacacatgtaaggaccagtgtttgaatctccagaacccatggaaacacaggtgtaggagaacacacctgtaatcctagtgttcctacagacagtgggacatgaatacaggagaattcccacaagcttcacagacctctatttctcagactccctagtacttggtaattctgatttatttccagaagtagtcctgtacacgaattccaagatctaaaatcctgtttgaatgtattagtcacatgggaagctactattttgagtctctcttgttttattttaaaacaaaacagatatcatagaaaggttgaggttcaaattccaactgacatttttcctttgttaattctaacttatatctggtcttaggaagtggtataattttttccctacccacttactggaatgttggcacgggttagaattagtactatgagaaaagaaatgaagtctgcaaacctgaagcacccttgcaaattcaagaaccagtgctggtccctgcctctgtcaggattgttgtcacgtggtaagtggacaagtacttcagtggttggctgcacagtgctgaggaattctctctcaggtgaggttaagggggaaatagctgggcaggaaagagagagaaaagaaacttagcagatgctgccagtcacttcttgcatggtaacttcaatccacgcaggatcttagcattgaatacaagagcgagccagaccttgtttgcagaggctggatccatcattctggctgtttgcttgacatcagtacaggaagtctgataagtacttcccatttagcactgactcttttttttttaagatttatttatttatttattatatgtaagtacactgtagctgtcttcagatactccagaagagggcatcggatttcattacggatggtttgaatcaccatgtggttgctgggatttgaactccagaccttcggaagagcagtcggcgctcttaaccactgagccatctcgccagccccgattctttcactcttctcaagcctgtactttctagagtcatccccagtccatccagtgcctactccttcctcttactcctgcatctcatctgtctgctctccctcaaagtgtacccagccactcccattgctagactagactgcccatgtcttccctgactctccattgcagtgttttcttccaggcttctgtctgttcctgtagtctcacccaaactcagtcatgtcaatcttgcgttctaacctcgctgaggggagagccccgacacgtatgatgcctggcacgtcttggcctactaagcttggcagtgcgcagcactcctggcctttgtcactccagccacaccagccgtgtgatgtttagccctcatccctgcattctgtcttctttctaggccttcactcaagtgttgtacgtatgtatgtatgtatgtgtgtgtgtatgtatgtgtgtaataggctctagtgaatgtgttaaataaataaaggaaatgagagtagaatttgagaaaggttaggtaattcacataaagtcagcccagcagctagagtgaggtctggtcagtttcctattttgcatgtctgcagtaacattttgttaattggcttaggtcttagcagtcagtacaacctttcagagactgttttgggatcccaggatctatcatagtgcctgtcacacacacatagttgtaggaagacaggacagcggaagaacagagtatcctcttggatagtgactgactcttcctactccccacatctctatgcctcatctctgcacagtgattggagcaaatgatcatgccctacttggtgtttgtagactcggccctacagaaacatgagtgcttcaagtcaagaggttattttttttaattgattgattgtttgattgattgattgattttggttttttcgagacagggtttctctgtgtagccctggctgtcctggaactcactttgtagaccaggctggcctcgaaatcagaaatctgcctgcctctgcctcccaagtgctgggattaaaggcgtgcgccatcactgcccagcccaagaggttatattaacacctatcaccaccattcatctaggagatgttagatacctgctgacagaatttgaaccaagccggactgtgaggcccactctttgatttcctagatccttttcaggtttgccaccatgtgggtttttacaggaaacagtaggagcacctggttggaggaaatcagcacagagtagggagttaaggtcaaatcccagcaaccacatggtggctcacaaccaccctaatcccgcaatgagatctgatgccctcttctggcacatctgaagacagctacagtgtacttaagtataatgataaataaatcttttttaaaaaaaagtaaggacgggggctgggaacagagtaatacaggtgatcttcactaataccatggttttggtagtaacttagaagccacaagcaaaacaaacaagttagttgccaaaatggcaaggcagaatgctccagtctgcctcaattaatggtgagcttactcaactagaggcagggccgtgggtctgcaacccagagactgacgtcagtgcttacaggagaaacagacactgtgactccaagaagtcatctcacctggctacctgtcttattaaagcagcctgggagtcatgtgtagaaggactcctgtgggtgatgaagcattgctttgcttgtattctgtgtttgggaagtagtgagggctgaatctgttagcgcttatctggctcggtgctaacaaccccagtactggcccattctagtattctcttacgttaaaaacaaataaatctgaggtgacagaacaaaactcattacctgaaggaatgaaatgatgtgatatgagtcccaacatattctagaataccacctcagagccatgtagcctttggcagtgacttagagtttagaagttgctcccattttgtaaactctaccaactccaggaggagcctttttggaggtgggaagatggggcgggggtccttctgctcttagagtgaccattcacctgacatttcctgaaaagctactaaatagacgccatggctgaaaatagcaagtatgaacatgtcttccagagctcactatccacaggagctgctgaagacatccaaagcttgggatgaagcagccaaggataagaatcctaccttggaactcagggctggaggagagtggcagccctccaggttcctggagtgaacccttgaccagtgacttgtgaggttggtggtagagtataggagctgactgtggggagcagaggatgagctggctttattggatgctctctcccaggctgtggtggcttctctgtgccctgcagagggcaccctttaccccaaggatgtaagttcattgtgctttaattcccctgactttaagtggggctgttacttactgctccctcagaggaagctctcccaaggtggctggaatttagaggctagtcggtgtattgctgagtcataagtctctatttactgaaagaagcagacccttgtctcggatctgaaatttactagagagagggaaaaggccagcacgttgtacagacaacatttctaatgtcttcctacccactgagagttgagatttagaatgctaaaaactagtccctggaagatgatcctgtttgcagatgcagtgtttatgagcaagtgaaacaaacacagtatgaccagtcagcggagagctggggtctttgcttagtcggcatgtaggctcccaggtctgaggttaagtgattccattactgttgacaaatgagctgtggggttttctggctaaggtaatggggccagagaccaactccaagcgttagccttctcggaacctgtatcatctctcattatctccagagctcgataataaacaaggtctattgacctgctatggctgcaccagacaggtgatatggacagcctgttcctttgaaaggagacttaatgaaagtgagatttctctgatgagagctgttcaagcaaattgtattgttactgctttgataggattgtgggtcttcttttaacacgagctagagaagagctttaaagagtgactttaacttgagaacccttgtacaggttctcaattggggtggggaaagtgggggatattgtaatctaaacacaggtcactcctaaacccctgagagacaggaggattactgcaggtttgaggtcatcttggtctacagcaagttctgggccaacaataaatacttagtaagactccatctcaaaaacagagcagcattgtacatagtagaaaaggatttcctggagagaggacacattcacacacaaatacacctcagagcagaccccaagccatgaaataaggacttagcacctttacattttattccccgttgtcttcaactgtagacacatttggtaagattcctggtatgaacagtgtgggtcagctcatgtttgctcatggctgaaaagttaaaggcagcttccgttaaaaacaggcaagaaggagctaaacaggtcctgctgctctggggacaatccttcccaatttaaagttcagaactttgctcatttctggtccagcttctcctctgctgcacataaagcccttggtggtctttctgcccttctttgaaacggagctagcagtttagcttctgttctccaaaagacagcaggcttgatggtgtatacttggagtactagcactggggaggctgagggaggataaccagcttgaggccagcctgggctgctactgggctacacaggcaggcccatcttagagactgaagagtaggagacctgctttaggtgtgggtctgtgcatcttctttgctctctgtctaaacccatggtttttgttggtgctcttttctctccttaatgacatcatctaaagcccgggcctgtgtcacactcctcctcagctccttttccaacctcagtggccctctatgtttctcttttcttctgaattcccatacaacccttaaggaatctaacctgtatcctactatttaacttttcactaggcggaaggtgacagggacaacacttagggtgcttccatcccagctcccttgagcagagctgggtaggcttggcttcccaatactgatgttgttctagtctgtctttaacttcctgcctcctgccagtcattgttacacagcagaatgaaaaaaatgaaagggaagggaactgtgctgccaattggaggcctcattttcaatcgtgaaagtctttgaggagtttgataaagctgctgaacttactaagttaggcagaattaactcaactaatgagaacaggaagtgtgtggtagtaggttttcaaaggttcaggaatcaacaaaatgattgagcgtaaaaattcatgtggcctataaacatccttatttgtttattttggctttttgagacagggtcctaagtagcccagactaaccttgcactcactatgtaccgaagtctagccttgaaatcctgatcctcctgcctccacacctgagtgctggcattagaagtgtgtacaccactttcagttcaaaggacatagttcctcatccttctgcattgagtcagaagaacacagtataggtgtgccttccatctgagtgggattccagtgttggctccagtgtgaccattatacctctcaggtacctagagttcagagcttaacctacatctcagactgccactgggtcactgcccagcaagacggtgaattctgcatccgagctctccaggctctccaagagctggaaatttaaataaggctttcttgtttgactggctttcttttcttttttcttcctttcttctttcattcctctctccttccttgtttgtttgtttgtttgtttgtttgtttgtttgatttttaagacagaatctctccagtagctctggctgtggctatcctaaaactggctgggaatgtagaccaggctgggcttgaactcacagaaacatacctgcctctgtctcccaagtgctagaaataaaggtgtgcaccaccactcccagcttgaatttcattctaaattttgttctgcttggttttgttttgggggtgtatttgatgacgttcagtcagagatcatgtttctctgagtccctttattacacaccttggatttctaagtgagttaactttttggttttctgacacatctctggattaagtgtttctttgcataattccaaaatgttaaatttcattcagtagtgtttggacttttctttcttccttcctttttttccccatcttcattttttaaattgtgctcagatgtggccatctgttttttgttgttgttgttgttttttttttcttttgctatttttaaaggaatgtctaaagtcttgtcttgttgatataatcactttaagtgtttccatgatacaatctgactcgtgaaggaaaatcctgctgtacctttgtatgccagagcagattctactgacagggagggatgcacgagtatttttgccattggtcactaagccctttgcccttctgcacatggacagtaatgttgagtttaaggttattccagtagataaagtattgcacagacaacattgcaaaacagtactgaaataggctttgacaaatccattcgtctgttaggacagtattgtttctctacagctgctgttcttagagaggaggaattgggtggtaagaacctctgatcctctgcccttagtggtccaaccactgactcctgggacctaagcttcaaccctactttagggatgattctcagacctggccgacaggtgctcttgaatcgtggtaactggtttaaagacagtctgtcatgcactgttccctgtgggaattaacttgcattaacattagaaatgtgccaggcccattcaaggaagagggcaagtttaagccttgcttcctcctgcccaggaagcccacagagagggaagagggaaggattgagtgatcgcccccgaaagtgattgtcagggcagctttgactgtccttcctaggcggttaccccctaatttaagccagacttaaccatgaattttttttttttgtcgtggcataatatgaatttcccagtttttgttttcttgttaaatgttgtcacttaaaatgtagagactctggagtaatttgaaactgagaaagaaatgaaaaacagagtaggagtgacagtattctgacctctagaggaggtcaccacgacagtcaccttcaaagttgtcattctgacttggatgggcactgtatggcgttagtatggacgaaattgtgttccctcaaactcacaagttggtgccctagtcagctagactgactgtatttgggcctttaagaaggtaaagacgttgctgttgtgtggatggagccctagtctaccatgactaggtgagaagaggacaatagaccacttgtgggcagagaagaggcatgtgaggatccagggcaggtcgctgcccacatgccagggacactggtgttcggagaaagttgccttgtggtgatgtacggctttccccaaaccagtcaaggtaccactgcagtataaacagctacaggacagggattatcacccaggccaggaaagacctttctagcagaaacctcactctgcctgaggcctgccttccctcctgccccgcaagaagagtaagtcaccttccttctcacactctaggactactctgccccacctgctgctgtgcttactacagcccgtgtctgccctcacttgtgaatgatgagctgccacttggagcttggcgtgtggagcctgggtggggatgaaaggatgtgatatgagtcccagcacgtgtatcgggcccccagaggtgttttcccagaaagcacgggcaaagtgaagagccccagggcagcagggacagtgctctgcagagtctgacttgagaacagcatggccttcacgtcctggaagtagacgtgccagggcctcctgaggggcttccccagggtgggaagtactctgtgcactttcccaggcacgctgggtggtacatgagtgcatttttgttttcattcagagttagattttagtgatactgaagagtgtactgtctgttgactcagcccagatctgtatataaaacaccatttaattaatgccaggtccgctaagctagaaattgatggcagttaaggaaacaaacctacgcagggccagaacctggccatggttggcaggctagtcacaggacagggctagagcttgcttctggttctgccgtggtcatagtttcttcctctgccctccatcttgagtgggcgctgctctggcagcaggaagaaatatcagttctgccatttaagccaaacaagacaaaagctctaccctgaccacacactgtagaccggaggacaagacacacctaagatcttaagaacctgccataattactaacacggacagagcaaatacactgtgtttgaggccaccggatttcctgcccctgtctgggcagaactctcagttctgtggggctgcagcttctctgacctacagccaaagagcggaagccctggcctgagctgtcaggtgagatggactcacctcctctcattttcagtaccatgggtcccagtggatttttgatgtggtggtggtgctggtggtattatatgaatttcccagtttttgttttcttgttaaatgttgtcacttaaaatgtaaactctggagtaatttgaaattgggaaagaaatgaaaaacagagtaggagtgacagtattcaacctctagaggaggtcaccatgacagtcaccttcaaagttgtcattctgacttggatgggcactgtatggcgttagtatggctctttgtcccaattaagactgctgtcatagctgggcagtggtggcacacgcctttagtcccagcactcaggaggcagaggcaggcagatctatgagttcaaggccagcctggtctacagagtgagttccaggacagccagggctacacagagaaaccctgtctcgaaaaaccaaaaaaaaccaaaaaaaacaaaagactgttgtcactgcctgcctactaggctagactggccctgcctccttccactgtgcttactccttggctaccttaatatcactccccaacacctatcctgggagggtctccttgtgtagcccaggctggcctagagcctcagcctcctgagtgccaaaataacaggtaccaccaagtgtctatttgtggtcacagactaaaggaggacgggtttatatgagtttatagtacctgggaatataatccatcccagagaggaagtcatggcagcaggtcccgttgtatccagtcaggaagccaagagtgagaatgaggctgctcacctagtttcccctttttgttcagcatttaagagcccagcccagggaatgctgccctgttcagaatgtatcttcccaccccaattaaccccattaaagacatccctctggctttggcagatgcttatcttgtgattctggatctatcacattgataatagtaaatatcacacggacaaggtttgaccaattttctttttaattaactagtttaattaattaatttggcaagggagcaagccatggtagatgtagaagtcagaggacaatggagtagagtcagctctttccttccaccatatgtgtccccatgatcacgctcagtggtgagtgtctatttgtagagccatctcactgtccttaagctggttttattaattgcacagtgatagagtgcttgtcatattaaaaacagaataataccaagtcttcagtttcagattcttcagcttttctgatatggtagagttttcattattttcttaaaaactttaaataaaattaatatctcacatataccatctgaatcaaagatctaggtttacggaaatgatgggtaaacaacaggcaagaaaagagctgtgcagagtgtctaagtaagctgcccagggaggccgtgccccttcactgatgggtgctagagggctttctgctctgatgcctgttttcttgtgtgaccgtgaccctgagctgctagtcttggtggttttgttcctttctgctttgcatcttggccctgggacaaccttggcaagcagctcattgccaagtgttactggtgctgcttggctgaattcttaatggcccctctccttctgtctaccatgctctccagtcattatctcctcctttgagctcttcttcaggtctgctgtgtggttcctcttctgacccaggtcctcttcctgtgggcttacagcagcctccagtggtctgcatttatcatgccatgctctgagttagagctggtcttgtttgtcatggttactgtgtttttccttaagctttggaaccaagaaagactccttgtgcccctgggaacaccactcagcaggacgtaaggtctccgcaacctcctcagcccttcacttcttgttcagaacttcatttcttcactgcactgtgcacagtgtgtttggaacacagtcagcacataatacttcaggctgaaagcacagatggaatagcgggcatagtaatgtaccaggtaccgtactataaatccacggggctgtgctagcaatttattgatatccagtgtgccacaatgtatgtgtagaaacagttacattgtgcttgatatatataaccatggttaacagagaaggcctcactcctgttccctttaactccatgcctagggaacaatctacattaaaagaagaaagttctggagccagtgggatggcctaccagattaaggaatttgccaccaagcttgacaacctgagttaggtccctggaactcacaaagtagatggagaaaatcaactcttaaaggttttcctctgaccactgtacacattgtaccatgacatacatgtaccatggcatacgaaccttgtggcataagtgacccatccctcttcccacaaaaatatgttaaaaaaaaaaaaaagaggattcttctactttcctcccaattcggaggtccaagactgtgctttccccttcagcagccttgccctgagtttccatgaagattggatgttttcttttagacggggtttgactgttcttgcctatttcacagaatggttaggaaaaatgcatagtgcaatatgtctggagaaattttgtaagccagagagtggtgcgcacataaccgagggcagaggggagggcacggcagttttcaatgccatgaacagtggtttggtgtcctctgctgactagagaaatggcaggagcaactctgagcctcagctgtcctaatgggataaagcaatggtgacaatgtgaagatgctgtcctcaccaggcttccgtcatgcacagcacactattaggctcaggctctgcacagtcccaagtgaagggtttggtttctggtttttgtttttgttttttgtgcaggtaatatctgtaaatgaggtcggtatattttttcatgtatttttggccttttgttttatatacctacacttagaactcctgtttgaaagctttgcctttgatttacagagtaaagaatttctaagatggggattcatcagcagatcactggtgggaaacagtctagtgagtggttggtttgcacaggccacagatgggagccacgtgtgagcggaagtaattaatggcatcattaacaaaagttaaaatagcaggttaattgtagtagtgtgtgtttaaactgttgtgtccataatattatgatttcaacttgtaaccagtgtgaaaattattgctaagttacattattagttttgtgccagtttggtatttatttacactagtaaattctcagttcagagcagtcgaatttcaagggctcaaaagtcacctgtggcttgagactgacccttgataagctgagacctagagagtaactgagacaggttccctagtacattgttgcacacaacaaagcggtttaaaactggggaaaccatgtccggttattgtgggaaaccttgctgtgtgttaaattctttagttgctggcagtcccagcctgtgtgtggtgaagggaacattaggagctccctcctggctaggaggagaaggctgtagcagggctgcataaattcacatgcttgcttgctcattctttcaactcctcccacccttccctacatcctcctcctctttctcctcctcctccttcttcttgttattattattagatacacatgcacacacgtgtacacacactcaaaagattgctccttcttttaagaagaacttatttaggaagtcagaaattactttgaaaaattaatggtggctatgaacccaaccaatcccctgaaaaaaacatctcactttgaaagttacaacattggtgagctctggattgtgtggccctgatgcctccccactcaacaacactgtagaacagtgtgtagtgtgtgtgcccatggtatgcctaaatttgaagtatttataggaaatattggtgattgtagagtgcaagcacccagcaataatgtttttgttggcagtcaccatcccacgtgacagctataaaatgagttaaatagcccttgccagttatattgctttgtggtctaacattgccttctggctctgtcctatcgaagaatacggacaggtgatgagataagcccagggcagtactgtgcagaggcttgccaggagtccacagggcacagcctgcccacagtcctctgctctcagtccccaggcttttcaccgtgatcccagtctctctgccagtacctcagggcctttgctcagtttgctggtaggttactgacacataccgcatcaggctatgccccagtgatacttcttgggtgcttggatccagaatagagaaggaaggacccgagtgctgtggagcagtgtaggcctacagtgtgtcttcctccttgcagggttcttagagaagtttcttctgagtcagtctggcaggatcatggttgacaggatttcctggcagttaaaggttaaaacaaatgggcacaaaacttgaggtgtgcactcagttgaagaagccaatcagaaaggctgcacatggtgattacagctgggtagcattcgggaaactataggatctaggtcagtgggtatcaagaaatgggtagaaggaacaaatcctcagaatgcagtcttcaaaacatttctttttaagttcattgagaggtagttggatatttcccattctcctcacccctacatttgtctcctcctctattaaaaaatagcccccagtagaatatacagttgttctaaccagtgagcacacatggatacttcctatccacctgactccatcatttactcttgatttgtctgtcattataaaatggatagatcatatcaggtgtggggtcagtaatacatgggaaatctctgcctcccagtttgcaaagctcttctcatgcctgctgtctcgattgatcctcaccagaactcttcatggtagaaaggaaagagatgaacatctcacctgaagatgagcacatgttcagagaattgggactaggaagggatatactggctttttgccaggccacactgcccatggagatccctaagcagcaggttttaatccttatctctgcctgcccttaggtagataagtaaaagtgagccagtcaatgatgtccttttgttcccccagtgtgtgtttgtagccaatgggtggaatgaaccaatgtattctgtcagactactctgaggttagcttgggcctgtgtaatcttaagtagtcttggcaaccttttcctccagccatgtcctagaactcatgaagccaggcttgtttccagcctaattaaagcacggcacagagcagaggtgaggtcttcacaagaggtgctttgatttgctacttgttttgtcattgaaagagctgaaatttaggcatgtaagattccttttcctgcagaggtttctgagacagtaatccagaaaacccagaaacctagtgaagaggaagagctcagaagacagtttctctgagggaggaaccagcactcttcagcaaacacagtgctggatttggaccaagcaagcatccaaagcctgacttccaaactcaatttacaactccagtttgatacgttggcacatctcttccttcacgtgacttgggtctgtttgtgaggctttaagggcagagagtcatctgttcagtagagttgctgagctaccgttagcaactgtgcacagtcagaataaaatctaatcgttgaatcctgtctcttccctgaagcagaggtacctagtgttaattacagtcttgattcttaccatggaatccatcatttcccccatagagcttaaccctatgaaacgaggaagtatcctatccgtgtctggacccgagtgtcagagcagtacctactgctagcctctgaaccaacttcactccttcagtcaatgtgactcgtttgcagtgagctctgcgccatgtccagagctcatgcttatactgcatgtctttcaacacccaggctgcacacccctgctctcctctgtattggtttctatttccactatctcaataccctctaagaatattgctggttgccagcacccctcttaaattgtgacatcaaaactaatcttagtgttccatgtgctgtctggcctaggcaagagaataggtttcctgttttacagcctacatcacagagtaaacgattgaaattcccaatcagcattcctgcttcaaggtctgatttagctttatcatatgacacatgtatggtaccaacacgtttgtcttgtgtgtttataaggtctcttatgggaggttgggtgcttggatagacagtccagaaacagatccagaagagcatgtcaagcgatgttcaccagaggtatgaagaggatttagtgacgaaggggacctgagagctcatcgcagacagatctgataaggaagcggcaaacaccagagagccagtctaaccagtcagtgagcttcgggttcagtgagagatcctgtctaagaaaataaaatggatggtggtagagactctgtcccgtgcatgcacttgtgcacacatgcagacataccaaacacatcatcctggctcacatcattaataatcctctctaaaaagagccttacccaggctgataattctccttacttcacttgtctagaaagtaaacagaaaacacaataaggctagcatacttctgaggaaaaggtcccccagaatacagcagctgctgtgtgtcctcctgaactaactccaccttaaaaacacttattcagaaagctccttcccaagaccctggcctctctgaacactccagtgggcttaaagaggacataaagcaagaaccaggcattggggtgcacatctataatcctagcatcaggaggcagaggcagaaaaatggctgctaagttaagaccagcccaggctaaatagttccatatcagttggatttcgctaatttcagatcaaacacatccacaggaacataaagacaagggaccagttttcatcatctatgagtcctggggctgtttcttgagcccttggttggatttgctttctacagatgtaatatttgtgtaggtctgtgcaaactctactgtagaaggccccatagttcagcccaccctggaagtcatcccctttctggtagctattaagtcatcctccatcttcacagtgctgtctcctgcaagatgccacaccgatggggtcctctcctcagccattcacagaggcttcgcttagtgtgtcatggctgagatcaccaaccgctgtgtttactaggaagcatggcagcttgtcatatctttttcatggcttctcactgtatgaatgaagtacagagtatttatccatgtggttgaagggcatctgaatagcttaccattcttgacagttgtcaataaggctgctggaacacttttcctccccagagaataagcatgcaggatggcccggtagttaactgtagatttcactgacagtggctggctgctctggctctttcgaggaatgcaggagagttactactgctgtttcctgtctgctattactagagtagtacacaatgagaccttactgtaattttaatttgtgtggcctagtgattaacgattcagccatctcaaagcccacactgctttataacccacttgaaagtgtttatattttattctgcatttgaggcagtttttagccatagctttactgaggtataatttacatatcataaattcacccatttaaaatgtataatgtggtgagtttcagcagaccacagttggtcataaaatattcttatcactcaagatggtaactactcattagtgtggtagcttttgcttcagtctttctttcccattagttcaaagatctccagtatctgtgagacaccctcactcttgagtgtactcttgctgccttctggctctgttgttgttgtttaggtttttttgcagatgaaacactctatacaacaaaatacactgtgacttttgtcctaaaattgtaactatgctttctttaaaagtggtcattaattattgttgcatattcaagctcagcccttaggccataagaaacctgactaagcaagtccagtggccaccctcatggacttggctcctaggaggcagatgcagggtgattgtgagtttgaggttagctgaagctacatacagagaccttgacttaaaaatataaataaagacagtgaggctagagagatggcccagcagctgcttttccagagaacccaagttcatttcctgaatccacatgattgctcatagctatctatctgtaactccaattccaggggatccaaagatcccttttagccttccaaggcaccagggaatcttgtagcgcatggacatgcatgcaaaaactcccacacaaatgtgaaagcaacaagtatgtataaacaaataatacataaataacagtaaataatagcctaactagcttcacccaactctgaagttctgttgtactgtctcactgcccctgagtacagaagttacttgatggtgcttggtttccatggagagcttttatattttcctccttgtctttgatgttctaaacagtataatcagtgttgatatggatgcacatgtgcactctgacctgagcttttacatcactctgggatcctacataactctgtcattatttattttgataaaatccaaatattttatctctatttttctttccttccaagatgccttttagagagaaaccaatgctctgctgctgctctctctaggctctttgcttgtctgtctttgttagttctttgactctttctgggtgttgtgtttcttgtttttctactgcccagactgctgagcctcttgagctctgtgaaggctaaaagttggtttacattgctccttgttgcttccccccacttaatgctttaagtaactttccttctctccaacggagagaagtccactagcatgcccattgctttggaaagttctgcttctcacggttgaggtcactgctgtttccttttatgtctttcttcatggtgcttccacttctctgagacgtgactcgccctgaaagttcattatgtctttgggcattctgttaccatagccagtcatacctgcttatgttgcagatgactttagcagggccttggttaggagtggggctgccctgagccatggtaggcccagctctccttttccatgtctgtccttctccgtaagtacttgtgtacttcttgagtcccagtcctcccagcagaagagcctaactgagattctgaacgtgtgccatgtgtttcaagagctgtgctggagcaaatggatactaaaagatgactgaacagtatcctctaccaaaggacaacgttctttgaagaagtggatattacggtgcctgtgatagctctctgcattttcttcagtaaatgctgttgatgaggtaaagcgtgcaagtagaatcctggaagacaagcctaattttgactgccggtagatggcggttatttcaggagggaggataactaggtgtgaaggcacagaagccctactgtcagttcataactatgaagggagcatgtgcagacagatcaaagcagtgtcctcaggagcccaaagccgtgggccatagatggctgaagagacaagttgcatttccctacagaattgctcaagtgtcttcttatctggctgtttacacattattctccaagttctgtagctgaagagggaaagtgtgtgagggcaacctccaggctgtggatggatgcttgagagtttgggtcattgagttttgcctaggatgtttagtaatctatagctggtctctgctgctttgtgagtttctttttcccaccctttattctaccccaccccccacccccctgttttaaccccccccatcactaaataagagagaaagaaggagggagagagggagggaggaagacacacacacacagagagagagagagagagagagagagagagagagagagagaccctgaatataatttctttgttctttgaacacaactattaacaagccatatccaactgcaaacacccccccccccaatgaccaccaatcagcctcttggggccctagcatttatttaccctctgaaaagttctagaattccaactgtcacacaatagcagacactatctgcagctagcaaaactatgactctgctagatcatgaggcaaatcatagtctactgctgcagtcagtttggagaagccccatatccacatacatcagattagaacaaaaacacattcttataatatccctgtgtttaaagaaaacaaaattccaaaattctcactacagtaagctggtctttacagagctggtccacttaagtagcgcctgcagcaagagctgcaactgtgctgtgagagtgagcatgtctggctagcagttatttgaatgtaaaccttggaagaaaggcctagcagatagtcattgaaaatacaagaatctccagcaagtccaattccattttgatttttgaaggtgtagttaagactctaagacacagataatgacaacacaaatactgtcatatcaaaaggcctactgaatgttgctaactaacctcattgcattggagatagcagattttgagtgaagatgtctctaccctctttactctaacacctccctgcttccttcttaaagtgtcctgcctttaccacagaggtggatggtgtgccagttcttcaggaatgatctcctttgctatcattcaaagttccttctgtacttgctgtagttgctatcccagagggctgagtgttaaaaattgatatcccagagtggtgttgttgaaaaggttgtaagccattaggaggaggccattaggccacgagagacatgtcctggaaagtttggagggatcctagactcccagtctctatgggctttctggctgttaagtcgtttgctctgccatctgcttttgccattatgtgtcacccttaccagaggcccagagaatgggactgcctgatttgagttaaaacaagttttaacaaacagaccagaccttcaaaagtatgagttcagtctcttcagtagtcagtgtccaggcattttgttataatgatagaaaggtgactaacatgatgctgttgtgaagtgagtccttcaaagaacacatggactcttgaacccaatagaacgcctttattctctggccaggggccacattggggaacttgcccaaattgtgtaaccatcagccttaactgatcttgtctttttatgcacaagaaccatatcctggttgacacacttcaattagcaagatcacttaccagtaggcagagccacagaagccaaacaacaaggtcagtgtatttaaggactttcccagaactatagacctgctggattaggtctttgttctcattttggcaggtgttagggtctctgtgctgtgctcttaagtcagtggtgccttggtgtctttaataggtgtcagttgttctaggttctaggggcctgatataatctcatctgtgttccaccaaggtgagatgaacagtccctagccagtttgctggtctctcaaggaagtttcctaagggaactggctttgggtttagttcttgatttgtttttagcaaactcccaagttctttagaatctgacagtgccttttgcaggtcaagtagatgtttctgtgctgacacagtagagccagcagccttggttcatctgctgcaggtgttggtacattcctcttcactcattctgaagttcctttgtggggtcaccatttaccctaatcctgctggtaccttatatcttaagctctgtgctggctcatcatattacattacatgctgctttcttaacagaacggctttcttcctcactaaactgcttctttggtgccaacatcccttatcctatattcccaacaggttctgttgtctttacatgattgacttaagacctgttatgcatagtttttatttttattttgtatgtgggaagggggcacatggaacacacaaccgttttgagagtcagttcttacctgctaaccacctcaaggccaatccatgaatttttaataaagtcattcctttcaatgaacagatgaggaagccagagtgaaggtggggataaccaggaagtcatgtataaagcaagggcaggccagagctcttttcctttcctgctccttctcataattctgctaagtgtattactaaagctctaggactgagttaaaaggtctcccagaaggttcgctcaagctacctgcttactaaaaccagaaaagacggtagcaccaggtaaaagtgagagggagtgggagaggaaactgaaagttactttatcgcagagatggttacacataggccaatatcttcaggaaatgaaaaaaataacctttgttattgtagtaactaactgattctgctactctccttgatgaagtgacagtagtgacttactttgaaaacatctgtaaaatgagcaaaatctacaatgggtactgaatcaaacaggcgtcagacagtgtataggactctgactcttgagaagaaatatcatgataagccctacagtggctagaggcctctgcctctgtttgcttttctattttagggaagaaggtggaacttaagctaactggttcacaggaggcagatcctgaaattccaggtcacatagagttaggcttagtaagaactagaaaaagaggaagcaggtctgagcagagacaactgagttctgtttaaagggcttccctctttggagctgttgcctagtggctgtctgtgcatgtgagagcactcctagaagccagctcagattgccctctgcagagctaagcaaggaagggtggtgtcagagccgtgcagtgtggcagcatgtggggctgtcagctcaacctgagctaagagacccaccacagtttgactgtgacatatctcccacaggctagtatgttaggacctgtggtcttcagctgatagtcctgtttgagagagtcatagaaactttaagaggtagcgcctcactaggtggaagtggatcactggaggtaggccatgaggttttatcccctggccccacttcctgtctgttttctactctttgacaggtggcacagtatgaccaggttcctaatactggtctgccatttcctgtcgtaaaagactttctccctttgtttgttcatttgtttggcagggtctcattctgtggaccagctgaccttgaactcacagatccacctacctgcctcctaagtaccaggattaaagttgtgtaccactacacctggactgatcccttcttagaccattagccagacaaacccttccttgggttgctcctgttaggggttttgtcacagcaacaacacgagtaaccaacacaaaaacctggcactcagaagtgaggccattcctgggataaacctgaccacatggtttgtaggcttttgaaactggcttgtgtgaggaatgagaattcagaatgtagcgctctagactaaagaagccccagaatattataaactgaacttagtgggcatctggtggagcccagaagaccaaaacctgaaagaactgcaggcccgcaccatggctcagtcgatatagtacctgccatgcatgtaggatctgaattgtccagatctctggcatccatataaagggtgggtgtggcagtatgcatctgtaagcccacttcaggggttaaggaggtgtcacagacccctgcagctcactgaccaaccatcctggccaatgatgagttccagggtcagagaggaccttgtctcaaaactaagatcgcctggctcataaagtttcagagccgaacaaggactttgtcaggacctgagctagagtccgttcttgtgatattctggggagaatgtatgtctgtattctgcccatgtccttagaccttgaatgaggctcaattcaaaagtagtgagcttgctaggcctgtaattttagaattcaggaggtagaagcaaatggatctttgtgagtttgagattagccttaactacaaaggacatttcaaggcagcagagccactcaacctgtggcagtgcctttgccctggctcctgttgaggtagacagtgagagcagcaagtgaaacaaaatatcagcatgtacatttgtggaggaaggagctatgagcaagctgaagttatagatacaggggtgcaaatgcagctgtagttactagataggaacctcctattttatagggatgatatggaaggttccctgaggagaagacctgagccatccaaagctctaacttctgaatttgcaaattcatttgaccagagaacctgaagtaagtgtgtctacaggggttccctgatggataaatgcctatggaagtgtttccctggctctgcctttaaggacagaagaactctgatccaggaagatcaggctacatctccagctggaggttcaaggtaggatggtaagagaacaaggatggctcacaccaggggtccagcccactgaagccaggcagtgtgtggcaggatcaggaaagctccaggaggcctgtctcaggctgaagtggagggtgattaaagaagactcccagtatcgccctctgcctcgtatacatgtgcacatacatgtatgcatgcacatgtaggtacatgcatatgaacctaaagaacatgctgggctgggcttggtggttcatgttatcatcctcacactcaggaagtagagaaaggaggttcaggggttcaaggtgattctcagctacatagggcttaaggacagctgaaaagaaaagttaannnnnnnnnnnnnnnnnnnnnnnnnnnnnnnnnnnnnnnnnnnnnnnnnnnnnnnnnnnnnnnnnnnnnnnnnnnnnnnnnnnnnnnnnnnnnnnnnnnnnnnnnnnnnnnnnnnnnnnnnnnnnnnnnnnnnnnnnnnnnnnnnnnnnnnnnnnnnnnnnnnnnnnnnnnnnnnnnnnnnnnnnnnnnnnnnnnnnnnnnnnnnnnnnnnnnnnnnnnnnnnnnnnnnnnnnnnnnnnnnnnncggagtgtaccgtttcccaccgtcttaatttaacctagggagatccatgttgaaatccggatcccgggtggacttctccacctactgttagtgtaattatgagataatgcatttttattgttgtaagccactacatttgtggtaaattgttatagtcgtaacaataaagactatagaatagaaagtgttcttaataaaaactccaaattgtagaaaatataggtattaacagaactgaagatgcttaagtctcctagagattttcaaggcctttcaacaattgatgaaatgtttagagaaaatagtgaggacatagaagttctgcacctattaaccaccttgacctaacagacgttgtaggaaacacacttcctctctgtgaccgaccacggtatcttcatcaaactgagctacatactgggccctagatgtctctgtgcaagtaaaagaattgtgttcataccaagaaacacaaaagtcatactaaaagcatatattctgaccacagtagtcaatagcaacaaagcaagaaaataccgtagattctgaaacaaaattaaataacatacttccaaataatccacagttacaaagaaaaattcacaagggaaaatagcaaatactccaaccagctaaaaccaaaaccacaagtcacaaacatggtttgcagctgacacttgcttgacaggaagtacagatctttactacctctgaaaatgcatgttcaacactcaaaggtcattcatctccccagttagaacaaacccattatgtccttcacacagctatctcccacctttgcaacaatgacatttgaatgtatctacttgctaacagatccattcttcactgtgccccagtcctcctttcctgcttcataggatctcactctgcagccttggttggtctcaaacccaagaccctccaagtgctggccttgcaggtgcgctcttgcacctagctgtaaaactgtaaaagccttctaaagacgaggcctgcccttctttccaaatcttggtttctggtttctagcaccgtgtgcaacttttagtgagttctctgccaagttaagaagacatgaagaatctatctttgtggaaacccatgggaatcggcaacagagtcaccctgtgttagagaaatgaggccatgatcactgaatagctgacaaagctgccttcccatgtttctgcagtgttctttcagatagtggtatcccataagaaagcagtgtttcctgagaaaatgctaattttaccctaggttcaaatatagagtctgttccaggtgtacacaccatccaggcccttggtctgagaaccagccaggaccttctgagtctaacagccctctcctaggatcctgtaggaagtcatctgggctgagcctgctctgtcaagtggaaaactgggtctagatcctgaggtgcttctgacctagcctagttcatgggaccaactggtggagccagcaccacagcctggtctccagctcttggccaactttgtggtcctacaagtattaggtctcaaacctgggacaaagggcaaactaaagtgtctaattgtttaacatatcaaagcagacactatatgacgggcttgctcagcttccccagtacctgccacagaatcatcttggctggcactttggccctcaccttgggttctccagcccaggggttgggctccccttcccagaataaggtcagctatctcgttacccaacctcttgtctatctgcccttcccccctctcctcacattgcctagttcagtttgctgatcatggtcactctagactcttctagatgcctttatctctgcctgtggatttccttataattaagatgctcaaccccttagaaacagctctctctcttctcttctcttctcttctcttctcttctcttctcttctcttctcttctcttctcttctcttctcttctcttctcttctctctctctctctctctctctctctctctctcttctctctttgtttctttctttttcattcaacaggaaactggggagcttgaggttgccagtctcgggcctaggcagcagatctcagccacccacactggtggggccctatgctgttagcttcttctttcgctattttctacctaggtttcagtttttcacttgggtttgtttcccctttgtctctggttcagcttccttttcctgtttggtttttaagaagagtctaaatcctagctgtcttcagagggtttgtggtcttcagattcagagcacaggactctcctcagggttcccgtgcagacttcattcagtcatggtcccggggtgagtactggaacccaggatgggcagaggaaacctaggcttttggtgttgaggcttctctagaggtcctctctggtcctcgtggataccagtgatggggacatccagagccatagggcaaaggacttgccaaaattctaagtaacctcagtcccttctgctcttctcagacctgtcctatacgtgtagatgccagtgaccttgagtcactgagtcagaaagacttactcagaattgaccacctaccttagagaatagaggggattctgaactctgagggagagtttattactcagagggggggtggtagggcaaggcttttgagcagtgcctccggaccaagatgaggcctagtttcctttagaaaacagaagctgcatgcaccgtgacctgtggagagacttgtccctctttggctgctcgtcccatagatgatgttgagtattgttgagtgctagtcacctgaaaaccaggctgtactctgagtggccatccaaacagtgagtgttccgttcctgtaactacatgaaaggttgtggtaagattaacctccaagatttgggacttttatttgattaaattattatagtcttgtgtcttcgcataaaataataatcccccactttgtctggaaagtgctacttcaccagctgtctccctttgcctttcttggatggatgaggaaggtatgactgcgtctgccttgtggctgaggatgccgaggctctgaaaggctatgggacttacccagagcctacctggttgaggagggaccagacctggagcttccccatgctgcctcatccagacacttgagacacactttgcagtgagtttactggaatgaatgagaaagcgaagacagcgtaagcagccagggaacatggctgcccctcctattcagtctgctgagcaactgcagcccagctaggccagagaacactgatttggtgctggagttttggtgattttattcctgctgtgtgtgtgtgtgtgtgtgtgtgtgtgtgtgtgtgtgtgtgtgtgtgtgtgtctgtgtgtgtgtctgtgtctgtgtctgtgtctgtgtctgtgtgtgtttagtttttctatagcttcaggggatttgtgcatggagctgtgaaaaccaaaatgcttctgttcagatgtatgatattttcagttgtacattatattgtaaaagctgaggaagcttactagggtagaaaatagcaccagaaggaaatgggaaggaggcactaagatttcttaaaggtctctcaacccttagacattggagaagttgcaactgggaagcttcctacagtgactgtaggcccagggcagcgggactttaggcctttgactttccacttcagcagagtcactgtgttccttatgcaccccttattcgtgctgaaaagaagccctttgtatcatagcattgtgagtgacagggtttgaagtcccaattctagctctggagactagagatggacaagatttgtctgcagtaagttagtagccaaagtaagaagaaagccagggaattgtgtgtcccttcctcaacaaggttatgtgtgcttgtcagaacaaacaggctaatgccctgacactgtgactgtccatgtaagacacgatagcatctagactccccatttaccctgacaaccatggtagggctacagagggcttcctgtcaccaaggccacttctgaaccaggaaacctttctctagcacctcgtcagagacaaggagctgaattttcctgcacccttatcacaacacaggacactgcctcacagcggtgctgacaagaacaaatatggggaatggagctcccccagccgcagcctcagcaactgagcttctaaaagaggttgatgacggagtgaaaggaaaatggcctaaagatggatcatatacaggagcatcacatgaaggcaaagcaagcacccccatacccagagaaatacaaagattctgcccatgtagacagtccctctagagagaggacggtgccctcgtctaagtgaggggcatgctgcctgagtgtgtgtagtgtccactatcttcctcctatggcacagtgcatgtccttgtaggaattcatgacaattgaattctttctaagggattctaaaggaattaggggaagtgcctcttaaacatctgctgttgcctgaacctagaagttgtccacacaccagggtcacagactaggggacagtattcctggactcctttgtgaacattattcacaaatacatttctgtgtcagtgagaaataaactaagagaaggtgaaaggacttggccagaagcacaaccagtgagtgagtgtgtgagatccaagcctggggtatgagcctgtgaaccctgtgctgtcctggaggaagaattgacctccagcctcggacaggggaggaataagagctatagcaggatggggacacactctgtataggaccgtcgacacaggtaatatgtggggaatcacactcccgtagtcccagcacttggaaggctgatgtgagaaggttgttgggagtttgaggccaacctggtccacagattgagcaatttagtgaaatcctctctcaaaccctaaataacataggcacactgagaagtggcctcttagagaattctgaagcacaggaaggatttctttcaaagagctatctcagaggtcagtcagtcagcctgggctgctggagctgctggagagacagttcttctaggggaagggcaggcagcagttgagaaattaccaaggagagctagagaaagaacagctggagaggtggggagagaatgctgggccatcatcagtcctcggaacattttctttaaaaccacaatgcttacatgagacagatataaaatttagaactgaaaactattgtggcaaagagagacagcaaatgccctgaggtgggaacagtttggtacactggagagtcagaaaaaaatagagaggaccaagtcatgtgactgggaaaatggaagaaaatgagggccaaggacatagttcctgaagtctgtcagtgtacacaaaccgtttgattttactttccaagttatgagcaactttggagggaaagacagctaactgcagcctgagcacactaagaacattcccactgaccactgtgggtaatagttgccactaggacaagaatggaggcagaaagtcttctttggaagctgcttcagtcatccagatcagaggcagtagactggtggtggagttcaggggcaaggaggagagaggtagccagatacagtaaggatgtgggaggggtagcctgaaggacttcctagtacacccatgtgggtgaaagaaagcgtggggtctggtgtgatgtaggtgggtggtggttcctagggaacagggcttgacacagacagaactaggaggaactgtaggctttgaaccctgtacagcatacaccccccaaaatgtttcttgcgcaagctgacaagcaggaattgattagccaatatcacagtgcagccacgggatacaatgagaatgagtaattgatgatctcttcttccagtatgagccagttcacttccctagttactcagcttctttaccatgtagggtttttctctcaagcactcattttctcctgacatactatctaattcattcatgttttgttgactatttgtctttcctttccactccagctggattaccagttccaagacagcagggatgtggtcctgtaattccctagtgttttcccaaagcttaagaccatgcctgggaactcaaacgtttaatctctatgttcaatttctttttgatcctctgtgcttggagatgcttggctaccattgctgctgctcaatggagcttcctatggtgtcagatgttgtggttactctaagtggggaagaaatagtggccctgtgcaattgatactggctgcagccagtcatctctattgctctcaagggcctacagatattctgtgcgtgaagatgtgtgaaatcttgcacattctgaggcaccctcagtcttagagagcgctctgggatctcattcaaggtcatctgtcccagaaacttgtgaccaagcaagcctcaaagacctcatagtgactcttctgggagtgattccccaggatctgaagccatgccttgcccaagagagcttctgaagtgtttgccatctttcgtccccagtagtctaatggcctgaagctcctggtcactcacaacaggacatcatgttcctcagggaccaagtagaaactgtgggagaactggtcaagcccagtggctaccctggtaattgagtcgctggaagagacatccagtagccaccctgtgccagtgctaatgacaagcgctctcccagccgggcggggctgcgtgcctcgcatgtagtcgccatgggagctgtcgacttgctttcccccaaacaagacagcgctcttaaggtgcttgctccatgtcacagcttcaggtccttgttacagctgggattagaaccaggtctcttgtgccatgtgtgtcctttcagttgtagctcaaattgtaagaaccaagacctactacagtgtttacaatatccatccttccacactgtcactagctctgccctccttagcaagttttgcacccccatggcaagaactgcccaccagcctagacctgcttcagagcaagatgtttgtgtgttgctcagttctgtctgtccctgtgcctaatgacagtgcagttacttagatgttggttgaactgagccaaaggggtgtgctaaggattgggaatgttaactgaaatgagccattctcattccaaggctaccctcagagccagagatctaacaacacagctgtcctggagcacatcggactttctgaatgcttctgaggcatgcgtagcctgacgtccacatggcctatgggatggctctccaagcaatgggataagttggtggctttgagatgttataggaaatactgtgagcctaagaatataagatttccttaacagttggttttgttttttgtttttgtttttgttttgttttgttttgagaatcctcaagtcttcagagagaagtgaagaccactgtacacatttaggatagtagcctcagataaaaaaagcaaacatctagattgcctgtggcctcccagtgtgagccttcagcagtctggatggaaaagaagatgcctgggtttaacataaaattgtaggctgagttgcccaaagcctttatttgtgataaaggttactcaggcagtagcactttgtgtttgcacagaactgtgtggctatctagttccttgtttttttatttctgtaggttagtgaactactaaatgtggcaaggagattgacctttctcgggctgagtcaaaactgcatttatgatgataccaagactttattactcttgcttcctaagttcacagtggaactttccagaaatacttgacattggttttaaaacatactttaacttccagtactgttaaatgctcaccatttcattactacaaaatacttgatgtaattaacttagaaaaaatatatatttagttcatagtccaggattctgttactttgggcttctacagagtcgctcactgtggcggaaccattcatgttgcacatgaggaagtatgaaaacaaccaagagaagaccaggatcctgctgtctcttgtgaggacatgcttcaaacagaaggcagtttagcattatgtgcacttgggttcgggatggaggcccaccgttctaaccacgtagaaaaaagaacaggggcagcctacatgattgggctcaagttcttcacaaacataattcattagcagtgaaaaagaaatagcctaataccctagtttagagtaagcaaacagcacagccagcagccatatgttaaggagctatgagtagatcctgggtccaaaattgccaaaaacttttttggaaaaaagtatggactctgtattagaaaaaaaaatgtgggtgtgtgtgtcctaaattatatgttagaacatttgttttattgtgctgggaatcgaatctagggcctcatatattataggtaagtgctttgcccttgagctatatcctagctagtatgtctgttttaaagaaatgtaaacttagaaccttggacagtctaaatgagagggagagttgcatgtactgcgtatctctgtagatttgacagtttaaagagcagcttcaacaacaaggagaacttggaggtgaggaatttccctttgctcaggagagcagaaaagcatatcacatggcaacagtgaggtcagtagtagagcggagggactcctacacatcagcatagacttgggcagggcattctcctgcagcaagcctatctgccctcctggaaaacaagctactacagtatggagccagtcagttactctgactccaggtggttctcagttgctgagctgtgacatggtaatatagtgcagacttcctcattcccctgtaggaaggttggaaagccgtgtaccctagtggaaggggctgtgtgtgcccagcactgcccctcttcccttcgtggttggctcattctctcttcttgaaaggctttgcttctccctcacagcagcctctgtgatcccttgggcagcattaaatggaccccttcttaccctggttctagagaccttagagttgggtcctctgataagctagattcacctgagtatatcagttagagatagtagtggaaaaacaaagagatttgttgattttgcccacattaggaaaggaacaagtaaagaggtctagtgaccctcatgtttgtccttcaggaactatccttaagtttaggtttgaggggcaggtttagctttaaggtttaagcaatccttgtcacagcccattagtaacccatcattgatttgggtctgtcctgacactacgttggtagaatggtaagctagttggggctagggttggctttctgactttcttcaacatttgtccatatatatgttctctggcacatgtgcatgctttttcatcataaaagagccaagctttgaggatgagaaagggcaagaccttggaggaggcagctagaggagaagggtgggaacagagcaggtggagcgtgggagtgatgaggccagtgaggaaggctggaagaagcctccagatggactcccatgcggtgacctttcccccatgaactctgtacatttcagtgggaagtgggaggaaatgcaatgatgacttcaaatcagtgattttgagtgcccctcaagtggtctaccatactagcatgtgatagtttctcaaagaagatggaagtcagcaaagaccatttgctttacccatggtttcttttctgaaatccagtagatgagcaggagccaccccttcatcctggagctaccttgtaggctctagtgaggggctgccttgctcccagctgtgtgtgtgtggggggggggcttctttaatgatggtctcagctccttttaggaatcacttttggtgctatatgttgaaagcaaacaagttgttggggctttatgtactgccttggagtctggtccaatttcttgacttgggacatagttcaccacacaccccatcactcactaatttcggagttgaaggcactggtgtatgttgggtgaatatagagtggttcagacaagttctgacctccagaagtgttcagtctcaggacacataagctctaaatagcctttatgaaaacagtgcctgttaggagccattaagtatcagaagcacacataaccttgcagtagggccagatgcagaaacacacctccaggggccatgggcttcattgtatgtctccgttggtcactgtagtgctgttttataggcaaaacctcttttcctggatcatattcctcaggacagacagatgttcaaagcagcatgctttactcttagcactagtcgggtgagtaggagtaggcagttgccctttacctaagctttgaatcagacctctggatgtaaggagaacacatcttgagcaataatattcataattacctgagtaacagtgaagtcattttaaaggcccaaatgttgtgggacgcttcttctgccaagctctactttaccatgagacacagcctagccttctcactgaagtgtgctagacagggcaacatcagttccaggacattgagaagggaaatgcccaggaatccaccctgtcatcctggaccttccaaggtgggaatggaactgtggcctactttttagatcagcactaggagaacctgtatggagacattgcccaacagagggacctaaaatgagacagttggtagagtagcttttagaaaaccacctaggtaggctggagatgcaatagagagctcagaaaaggatcatctcacacttggacttaagactttaacaccccacacatggtggcacacatctttaatccccgcaggcagaggctagtggtctctaaagttcaaagccaatatggtctatatagtgagttccagaccagccagaggtacatatcaagaccctgtctacaaagaaaggtatctaaattctttacagattagtgggaagtacttgtcagttcagctggaaagagtcccgtaggcaaaacagaataaactgagctagcgaggccacagaaacagtacctgttaggagccatatttccaccagactagatggggttggggctcagctggggacttgttgggaggatggaatgtgaagagttctgagggccttccaggagcccaggttgtgccttacttacatggtgacaagatgtacatcttaattcctcagagtaaccaccagggaagtgaggaaagaggaaggagagcagtaggtaaggagaacgaaccacagatgagcactctgtctgaggtcattatagcctctgtggggtggtcaggctcccagtgaggcttgaagaggcaggcccatctgcctttgaagtctttttctggcctcattaagggatattgagactccagacactggaacccaaagataggaaagtaggcaggaagccattatgatgttgtagaggtatagatgataatgatataggcttcaaacactagcaagccaggagaccagagggcaagagaccggcaatatgtttaggaaacacaacagctggcctagtagccatagagggcggggcttgaagaggtgagcatcgaaaatgactctcacagatcaggcatggcctggaggtgggatggctggcacttcttatagtaggaagcattgcaaaggttttctgtttgagcctgtcgatttttgaggtacctgaggtattaccagtagtctgaaatacagtgtctggatgagagctttattaacccaggatctctggtaatcaccatgaaccctagccatggtgaggaccatgaggagactccttctaggattgttggcaccagaatctataatcatgtagagatggagtctccatctgaaattcacactgagccagaaccacataaggagatctgggtacttgtttgataataagtaccttgctagtttttgcaatgcatacagttttgagagctgtggccatggagtgacagaagaaatcagaagtagcaaaatttaaggtaaactttaaaatccacttgcaatagagactcatttgaagcataatcaagacatacttcacatacagtcagtcgcctttacaattgatttcagaggcctctagacacctcaggcatttccttggccccagctaaaggacctgataaaagagaaatgtagtcaattcaaaactatgaaggaggctaaaacactccagaagtaccagaactgtcatagagaaccaggagagtcggtcagggcaggtttcaaaactaaagacagcagcatttgagtctccaggagcggctaaatgattttggagactaagggtccatttattctcaggaacagaagccagccagctccactggcagcttggagagtggggactgggtggagagggagaacagaccatcagcttcctggaagaaaggcgctgcaggggagcaactaggagtgagggccagcccagcagtgtttattaggtgtatcctctgagtgaaagactacatttctaaaacatgagctgccactagagtgactacctcacgttggtgtgcctgaactgttcccgtttccatagggaatgccctccttcctaggaagcccctgagttacatggacttgttgaccagatgaaacaaaccttcaggtcagaatgggctagctgttttgttagaaactgtcaagccaccatattgggcctgagcagggccattccatcagttctgggcagctgaacggctagaacccagcagcagtgacagctacatagcagtcaagatcttactcctctctcccacactggcaatataaatggcaaaaggggaatgtatatcttcttccatttaggcttactagtcacaaaaagtgaaagaaagaaagaaaagtactattcaaatggggatgaaaacaggcttttggttaaccacaggtttaaattgaacccacagtgttaaaaacaacagcgggggagggggaaacctgtgactatcattacaataactaaaatgtatttcttttatctctcttcttacaacctctgaataatgtgtgataccccagacacattgcatctactttggggaggggggtggtctgcagctctctgcatactgtgtggttcttgcctttgcccctgtctgggctgcctgtctcctctgcctagacttctacatctgctttgtctaagaatttaagaccatcatctttaatcccaaactgttttcttcccaagatcccctgcttccccagagctctcctagccaggtgaggtgtgtgtagttctttgtctgactcctgtctgtaagctccctacagcaaccactgccctatccatctgttctttgactcatgggcatctatgctacagttaacacatgctcagtttgagtggtctgatgggttgctatgggctgttcagaaaacaagctatgactggaaaactagaatgtactaagaccaagaagagcgtgtctacatcagtcatccaactgacctctttagagaggcctcaatgctcagttattcagagtttgctatatgttgtcagggctgctttattgaacccaatagagaattgggttgcatcatctagggctcttttcagctctgagagtctctattgagcacttaataggcacttgctggatgtactctaccaaaggtaacaaggtcacctgtttagaatttgtcggaaaacctatccgacatatatcctagaccacaagttctgaggaggtcttgagctcagccctcagtactcagggtgaattggccacatgcctttccaagaggactgattaatcctttaaaagcaccatgtctgtgctggggacaaggctttttccaaatattttggttccctgcccttcttatgataaaatacacacagtgtgacatttcctttctgcttggtttggctgttatgattacccaacactgccactttgcttcttcattattactctctaaagtggagattctgtctcagtccacctgtggtccacactggtctagtgtggcctcctttctaagcactgtcactttcctgtggtcagccttgggaatccttacttaacactaagactgtattcaagattcttgggctctgaaaactaaatagctggccagtgtagtgtgttcgttttagtggtgacatttgacctctgcagagggaaggctccagttgagtccttggttttccgacatattctaaacaggtggccttgttttgccaggtgtctgtagcctagaaccagtgtgtgtgagcgacagttgctcagttcttgaggtcacctaacctcctcattgtcaacatggcatttctcatgccttgacactggatataaattgaacattttgttggatgctgcaaagaaaacctctgtgtggtgtactctggagttagaactggcttgacatttgaaaccccatctctggtacctaggtaaactcctggggctcctccccagtgtctcagacagtattgcctcatcaaatgggggtaattggtggctacttgaagctgtgtgtgaggcaacagtgcttagatgcattgtattatgtaacacagggtttctaagaatcaactagtaagaattcctttttcctcaagcacacctccctgcaaagccaagccatgagtctcccaagctgtggggtgttggcagatgccctttggtgggaggacaaactcatcactgcttttacagagcagccccgctgtggcagcaagttcatggtgcctttgacctctgtttgaggacagggccagtgtctatccaccttagccaagtgtgaccctgtgttttcttgctctttctgaagtgaacagagtatctgccaagcgcgggcctccgtgatggtctacgatgacaccagtaagaagtgggtaccgatcaagcctggccagcagggattcagccggatcaacatctaccacaacactgccagcagcaccttcagagtggtcggggtcaagctacaggaccagcaggtaacccagctctgcagtcagcaacgtacccctgagctgccagcctgccagtgcgtgcttggggaaaagaggcccagacacttcagcatccgggagagagcctgagagccaaagcgtgagaccgaaagcaaactatcttttctgagagtcatttcccatgtcatatgcaaacagtaagctacacctttctgctccactgtgtcagatcagaatgcagggactaataaaatataaagtaagataaaatatcctgtcagatcagaataaaataattgtgagaaggctttgaaaagtatagtcggtgtgggctagggagatggctctgtagatagataaaagtactcagccgtgcacagttgaggaaggcacttggcatcagcctctgcctaaacacttacatgcatacatgcatacagatatgtgtgccgagcacaaaaagagaaaaaagaaaaacgtgcagcatggatctttcactgcagttctgttagaacttgctattgagattttgagtttgcccccagccctgagacggctggagggttgtgttatcgctccctaacatacagcctggacagatcagctgaagtagtatgtagttagtgtgcctgggtataagtaatatctcctgcctgttcatgtcacacgtaaccaaggcaaagtagtgcaaaggaacgtgctatccatcgtgccttcctaagtgccccgtgctgcccaccctgttgcctttgggaggactgaccaggattcagaacagtaaggctagaagatctgtggtttcattgtttataacaacacctgagatggctcagtaattaagaggctgtctttccagaggacaattcccagcacccacatagcaacgtacaagtgtccataagtacaattccagggcatccagtatcttctggtttcttcagataccaggtactcatagacatacatggtgtttagacatacctgcaggcaaaacacccatacatataaagcaacaacagtaacagtgatgataaaataaaacacctctccttaaatggtgttttctgacagctttgtggtcaggttggctaagagaatgctaggtttcctgttgtctctgaagcctgtggcagcaagctaacaatgtgaagagaaacttggagttcaggtgtagggattgcccattggacaggtgtctgcattggccaaagcagcccgagtacatttcagagcctttgtccctgttaggaagaagagacaaacacactttaggactgtagctctgaggtaactcatgcggctcttagaggtgctccttcccctcggtgaagtctttgacatgaaggcattgttcctgagtcagtggggatcccaaagtggctgcttttttttttttaatctagaactgaggctggagatctcattcagcaccccatgtatgctaagcaaaagctgcatgcatgctaggcaggtgtgctaccactgagccactgctgcagccatttggtcactccggaacttccagtgctgtgaaatgaatagatttctttataaagttagtctgcttctgtgcctcattatagtaatgaaaacagactaaccacagcatactgttgagcccatgagggaagctggggtgtaggtaagattctgggaaggttattctgtcattagatggagatctatttggatctcagagtctttaccaacttacattgttttttttagatcctagccatagcataagggccaagaagattgttctctatcacaatatttttctctgtaaaaaaccattacattatttctactcagaagcctcaaaaccatgttagacaatatttgatgtttcaagggctttagaaacaaacaaacaaacaaaaaaatcaggaaaggcactcccatatactcccacactctccaaaattagacagcggtgtgattatggctcctatgtggaaagtgccccatttaaaataagcttatcctttgaaaggataaatcagtcctgctgaatactagggggttatctttacactaaacctgactagaaaagctggtagctggtatgtatgtcagacacgacaggcagcaagcattccaaagtagaaaagagactgacctttttaagaagaggctccactaaaagagaagtcacagcagccctaaatttaaatgtatctaacaatgtactttccaaatatataaagcagaaatgaaccaatctaaagatttcaggaaatagactaattgcgaagcctgcctgattctgatcatgcctccaagtagcgtgtgaacagcagacagaaacgaaaacacggggattctcgtaggcattgttaaccggcctgacctggttgatgttatggaaactgcagccaatagctgtacagtaccgtgtcttagttagggttcctattgttgtgaaagacaccatggccacagtaactcttcataagggaaacactgaattggggctggcttacagtttcagaatttaatccgttatcatcatggtggcacataggcaggcatgctgaacaagccaagaattctacatttagatcggcaggcagcagaaaaagagtgacactgggcctggcttgagcttctgaaacctcaagcccacctctagtgacaaacttcctccagtagggtgctgtgcagacagaactagcccagcagaaatgagagcacactgtcagctcgttctgctggcagtgagccgaagcgtgtaatcctctctgcagactccgcctctaactccagcttgcccgttagcttactgtgtaactttgtaagtcactgggtttccctggcccccattccccactgtgtaaaaatatttcctcagatccacctgagttctttgcagttctctgctgtccaccctgttcctgtacctggcatggatattccattcctcttgattcttgtaccctgagtcccctctgagagccaagcatctcacctcacagatgcggaagtctcacttcctctgagcacctctccagggagtcttgatttgctccatctctagcagcttcacgtccagctgacacagctctcacagctttctctttagtttgctttgatttcttttttgcacttgtttttcaagacagtttctttgtataatagcactggctatcctggacttgctttgtagaccaggctggcctcaaactcagagagatccccctgcctctgcttacccagtgctgggattgtaggcgagtaccaccatgcctagcattgctctggtttcttaatgttcatcaaaactatagatggaagattggcagtccatctcatacatacactgcacaaaagctcaagccctttgtcaactgctagcttgggtcttctgtttatcagcacacatgaaatctgctcctgctcgggaacctgtatcagatatcagccaaggtccccgcctgttgctgtgtaagttgtgaaatgagtcctctcttctcctggcttagtgcatgtgtgtccaacggcttatctcactttagtccattgtaggtgggcccagaaccatcttgcacaggatagggccctaggatgctgctgttctagatactgtccacaactgctgttctgacctttcctgattccgtagcacagcagtcagagcagttgaggagagcaaccatccattgccatattcttcccactccaagggcaagacgactcataggtggagggtcacacagcagagtgacagctacagcccagagtagtatcaggctaccgttgacttcagggagcggcacttactagagagcctgaactcactcttcagtgtctagaagagtaaacatctagaggccagcagactgctgatgagagtgtctgccttctctttccctgcctggcttgacattgcatctcacacgctgtgatgtctattggttgactaataacaaagacagtaatgaggctatatgtctgtgtagtacattaatttccacaagtcagccttgaaactagaacttgtttttatgacttctcaacactcttgttgagggctgtgggaaactgagaccaaattgcagaagactgttactttaaggagcttcatatctaggagctatagataaaatagctggctttgggagatcctttcagaatccccacaaggtcggtaaggcagcattagatcttccatattactggagaaactgagccacaggaaactgcattgatcccctaagtggtacagctagccaagagacaaggtctggaccagaactcagccagggatcctgacccccagctcagagctcactaaatgaaataagttttgcaaccattcagtgtggtctgaaatggtccgatcaccctttcccttctgtggtcctcacccacccccaccctgtggctgaaaggatacggtgtctttgccccatgccagttccctgcagctcacttacattttatttattttctcctccaggttgtgatcaattattcaattgttaaagggctgaagtacaatcaggcaacacccaccttccatcagtggcgagatgcccgtcaggtctatggcttaaactttgcaagtaaggaagaagcaaccacattctccaatgccatgctctttgccctgaacatcatgaattcccaagaaggaggtaagcagggttttatctttcctggatgctgagactctcttgttctgtgtcccagctctggctggctgacatggctacttcactgttgacatgatttggagcctagtacttgtcttgaggttcagcgtcatgactaagagggagtgatgtgccatttgtgaaagcaggtctgtagtgaagtgctcctgcagccctcagtgaggcatactttatgttgcccgtcccacctccatgtaccagaacagacgcctggcaggaaactggctgggaagtaaacggagtcctaagctctcagcgctttagggtttagagttcacagattactatctagctgactgtagtggtctgcagtgagtgccaagtacttggtgagtacaaagggaaacagggagctgcccattgggctgtatgggagaccacagcagtagcgctggccaaagggcaaacaacagtgtctggggcctggggccaggtgcacagcagctagctgaaactggcagggtggcagcttggacacagtaagacctggggtggggacaagcaacagcacccgagccgaacagcaacctgctcacggccttattgcagcagctttgagggaggacagaggccttcccgtcaagggtgtcttgctggcctcagatatcggcaggaacctgacttaaccacagtggagcacagcgcggtggctgtggactaggcttggagtcgctctgttgggtttgagctctggtttgcttcattccagccaagggacccttgaacaacttcctgcaggttcctaggcctcagtgtccctgcctacaaatgcaggtgtggagagttgcttcacattcaaatgagccatcctgtgccaccgttaggttttctgctttgaagtcctgtgattttgcagctgtgcttccaggggtcaaggaagtgtatttcttggtctggtgaggctgcctcctgccatcattcaggtcccttgcaggagaataaggagggctttggagtcaggtgtctgccttgtgctgacaccacctccaggaagtgacctgtcttttgcctgcactgttggttggctcagcccccacccagagaggtgttgagtgttgttcttcctcactctgttctgctcagtttccctctccacctcagatttaccctccagtagtagggagacactctttaactcacttgagtctgtaggaagagcccagcaattccagagttctggaggcaggaggcagggttctaacccagctgcactgcagagttcagggggcttttgttgtttgtttgttttatctccattggtgttctggactctgaaaaggcagggttggtgtagataaagattgttccaccaggaaagcatggaaacaaaggtattttttgtggacaagccacacctgctaagcacagtgcagcatgcagctagaaaacatattttgaattttctgagctaaaacttaactcttttttaagaaaaaagtatgttttaaacagttctagagtatactaaattttctaggattataactatggtacacatcaaagggaaactaggcttgattctgtttgtaactttactgagagttgttctgttttggaaaacccagtatccagtgttgtagctgtgatattttagatatccagacggctcccctgtaacaaatctatctgtggcaaccacatttcctcagagtccgtggacaagtgcaagcagctctctgattctgtctcttgtaggtgtgtctggacttttacatacatgatggacacttcttatagatcacttctctgcctccctttcctgaacacttaaagtgctatcctgggttttctgatctatgtagagcagttatataattcctgaattgcatttcagggtaatacaagacatttcaaaatgttggttatggagaagggcttcagttcttaggctggagagctgcttgacctaggagcaatgtgaaatcagactcctcccttgttccatgtctgcgatttcatttcatcgtcactcagacatctcacaatggggaaagccaagtctcggggagaaagcatggcaagcatttgatccgagccattgatttgactttgtaaggaaaatgaacagggtgagagagagccttgatcaggggagaagagcatgggaggaagagcatccttgcctcaggttctgttttgagcatgttgctgcatctgcaaatggttgtaatggcgtgtgctgctggtggttatgtcacctgactgttgtgtaggatgccgtgtgccagggagatggccttaagtgctactccctccccctgagctactctgttcccacggccagcgttctctccaggctcaccacagacatcttgtaataatgttattccaggagcgcagaactaggacggcacttgaagcaaggtgcctacatggtaggactttgcctccttcccctaaagctgaattcagctgacatttccaaccccagatggggtctgcagagttggaactggagaaggagcctgaggtgtcttgaagccacaagtttattatcagtagtcacgttcaaggcctcttagcaaaacaactgaaaatcacacagatttggaaaaaaaaaaaaaaaagaagaagaagaagaagaggaggaggagaaggaggaggaggagaacctagcaccccgagagagagagagagagagagagagagagagagagagagagagagagagagagagcaaagccaaggtgcattttaaaggtctgaggaggttccggggagggcattgtacatagaacatgcaggaatacactgtcaagactgacaataggccacatgagcatgagggagcacttgaccccattcattttctgaggctccctcttatggggttcaggaagaggaggaagtggctactaaggggtgtagtttaggtggttttgttttgatttatagactaggtcacaatcactttctactgtgcatgtctctcattgtgaatctaattgcaatgatatgatatgcatacccaatatacgttggcataagataggaaatatggggttctccttaaaagtttatagacagttttgctttatatagtcaaaaccagttcacgacaggtcagctcttttgttcttcctacctatctacctggatacattaggaatgcacttgtacagaaaaaaatccaaattcaataactgcatggcagagaaatgtctactgtttagagaggaggtacacatagtctgatatcacgcaaggtggggatctgaagaggttctgaggtgcattgttcagagagagctacgtgcatggtgcatgcaggtaaaagagctaggctgccaggtgcattatcgtaagagaggtggaaaccaaaaccagctagggtcataggatcctaaactattccttatgttttcctgcctcaagtttgcattttgtaggtaacagaactaaccccaatcctgagtgaggcttatatagaatagattaaagctaggtccacaaccaagcattctcctcctatcccagccagtctgggtctgagatgccatttcttcctggagtctgcggtcagagtggtgctttgggaagcaggcaggtgcaaggcatcttttcccttttggttcttgctaatgaagactgtgcagaccttcgaagtaggtatagtacagggcccaccaacacttctgagaaacagactaccatatttagagcttaggactcttccttttggcatacgaagaatacttttccccccatgagcctgagttccagtccctgcaacaatggtgtgagtttgaattcacaggggagcagccctgcaattgctgatagcccatctgaccttgggcacgacctgagcctcaatttcccatctagaatgcagtacctatcagaaatgagatcatgaagattaaaaatagtaatgacaggagttttgaagacaaataagggcagaacagctttagcctgaagttaggggtcagccacatagtgtgtccaagctctctgtggaggtagtggctcctttaaaagcatgaactggctaccagaagttgcagcctgggaaatcctggatgttaacttggtctggaaaggggcaggaagcagagcaggaggatgagtgatcaaaaggctgcaggcttgagattaggctgggctgatttcagattgtttctgaggagtaccaggggccagcattttctctaggattcactgtgaataggcttggtctatctcctcactgtgaacctgggtgaagtcttaaacctcagagcttcttgaagtcagcttcagttttgcttcccacaaaccttattttgctagaaattatgaaacttttccctggaagagatagaactcctaaactgttttttgcatctcccctgcagtggggatgttggctgttggtatggcttcctctgggtgtgccttttgggccaaggtcacacttcctacccaggctttgtttccaggctctgctcattccatctgccctgccccctactggccacactgtaaacagtggccctctgtgtttgtctacccacctcactaagagaacctgagctttgtaacagtctccatgccaacaatacacaagtccccttcacactttgctcctgctaggccttccccacctctgaccccttctccctcctcacctgcctgacgtaattcagaatccccatagttcctcgctctcctcagtgtgcccctgttactgtattttttttgcctctatcctcacggtaacacttggcacagcacattcgagcacatggattcagccaggtgtggaaattaaagaccggtccctagaacctcaaaagccagcctgatacctgatgccaggtacaccctgacaaggcttggggatgtggcaggcctggagctcatttacaacccaaagtccttaacacagttccagctgccttagaccatgtttggggaggaagggatgtgtgctgggccaagtcccaggagaactctatctcatggtctcctcccagctccctcatcttcagcccatagatttaccgtccctctcctgactgtatggacaaaccaacaagttcgccttgacttccctttccagataagggccaggcatccatccagcctggctgccagtgctgtttacgtcaatgacctgcacagccctccacaatgcaccttgcctttgacttactttatgacttggcgtagtgcgctctcctgcttgtgatatttcttatgtaccactctgaatgtggattcactccagatgctcagagaacctggatccttcccaggactcttggttggctgggttcagttattgagtttctctggagcaagttgccttccatatctgtatttatctacaccctaagagactgacatgcaagtgtttgtggtgcatgcatgagcgagtgagcgagtgggttcaccatgtgttcttccattgtattgtgcaccttgcaaacatacccctcgcttcctgcttctgtaccctctcctgaagaccacgatgaagctcctgaaccgccagcaccatttgccatctgtgaaaatgggctcaaggtgaggggtgctatctgtgattgagggacatggtcaatggaattgtctcacacagaaatcgcacccgtcaccttggcctgctgagcaccaccagaaccaagaagcacagcaccccaaaccaagcagcagccctggtgaagtccccgtgaatgtggccgtgatgtgtgtgagctgtggaaggagctgtggatgcagacctgggcagtgtgtggggtttcgattcggattctgtaaccgccatgaccagcagagtgagagataagaaagcagttcagtccaacatgcctaactattggttcaaacttcaggagtctgaccccaaataattaagtttaggcacatttaagcacagcacaatttggtgctttcctggtgataattaactcagtcctgtatatacaacaaagcttaagatgtgactacatcaaaactctttgtaaagtacgtgtgacatcttccataaagatgagttctgtagattgacaagctcacagtaagagtctggggaggatcctgtgtggtctcggccacatagatagcacagaggtcaccaggctgttaaccacgtttgctcccaaccttctgggcagataacaggttatgtgtccctccctttgaagggacaactctgtgtgttcagcattcctggttccctagtacttatctgtgagcacagagaccttcatacctcccacaagatagatctgttctccagctcttttgcaaagtactcaccctttctaaatttgtttttccatctgtgaaatgggttgtcacacctacctcacaggggtgttctgagtgcaacacaagacattgtgcaagttctttatcagttgaaaaatcactccagcagcttgaaatgcctctccttacaaagcaggagttctcatcacccactcatgtgacagtgctaataggagaggaggacatggtctctgtggggagtttacatgaaggtctctggaaaggcctgaactttttagggtgccctgcatggggacccttaatctcagagcatctcctttaaagtagtactggctcatctgcagtttacatcccaggagagaaaagctgccttctcctccagcaccaaggtcacttcctcaacactgatggcaacatgctactgatgcttcaggcttcctgaaaccccacagacccaatgatagtatgagacggtgatccagagcatagctatcttacacgcctgtcctccatactcagagaacagacaagcgaggtgagctacatatagccaacacaggcagctcaagagggacacaaactagaagcaggggacccttctgtgccctagctgcctgcatctgttctacactctgttatagttagtgaacatagacccaacacatctatttctgcatgcccccatgccaagtcttactttccttatctttgaagtggacacaagggctgatgagatggcttagttgaggaagggaaggtgcttgctgctaagtctggcaaccatagttcagtccccaggacccacagtggtgaaaggaaagaaccagctcctgaaagctgtgctctagcttccatacacgcacacgtaaagtagacaagagggagggaggctttaaggatcgaagcgctgtcatacacaatctctggggctcctgtcccctttgacactcacattggtagtgtgatgccgctaggactataagaagtgccttagagaaagacaagagcctccctttccacattgccattgtacatctcctccctgcatcgtcatagtatctcctgaattctctagagaggttaggaattcttgcctcttctttaaagacaagaaaacaaaggctcatagcagtccataatttgctgaataccacactaatgataaagacttcagtgtgcagtccagatctctgcccatcacactgtctcccaaaggactgactctgcttgtctggtagctagcaaactgtaaggatagcacaccttcatcagaactatttatgaacacttcacttggcccatctttgtagacagagaatgtaagtggagaattcattgatgtccattttctttctctcatagcatgtataacctctttcccacagagtaactccaatgcacacctgtaggtgtagcacttgggagactgagtcaggaagattggttcaagttttagcaccagcccagactacataatgaatctttgtctcaaaagaaacaaaaaacacaataataataattttaaaagtagcttcttgccaacttcaactcttgggtgtgaagagctgactcaaatgttgtagttaaatagccacccccaaggctcacaaagccaagtcctgagagatacagccttcactatctagagtagatgtggcatctgatcatgaggctctgttccattttgtctgccgcctgtgttcattggtttatccattctttcaaaactggatttttataacacccacccagtcagtttgcctacctctgtgtttagcttatttgagtctcttccacacagcaagcagatctttccagtgttcagtataacctggtcacatcttactcagagctctgagggccatcagtcttaattcagtatgaagtccgaacccttacagggcttgcctccctggtcttggctgcctttctgaattttctctgtacactcactttgctcaggtttatccagatgcatagcctcctaccatttcccagaaacacaagggcttgacctaggacctgcacactcaatgtgttgttaaggtcacagttcctttgctcacttctctgggaactgcctacacatcacccagttagagttagcgtgttacaacaagtgtaaaggaattatatagtctggctagcctgtacagaagacagggagccctggtattgtatttgcaagctgtaagcctggattggcagattgcatgctactctcctacatccagtccatgtccctgtcacttgcagtctgagtcttgtccaagctgccttcttccatcagttcatcctcagagtgcacttctcagccacatgctcctggtccatcccatctaatggacaccttctccccctgctccctcttgagacccgtcactcattcctcatgtcccacctttctctccaggcctgttattaaccaatagctttaaattagggagcaaggtttatacaacaaaaagctggggtccatgagaattaatttatctggaggcaaccagatcttggggttcagaatttagcattgtctacatagcaacacagcagcccccagcaatcaccttagcaccgttctcccattcggctttattcttcttttctgtattatgtcttcttgcctaccttgtctcttaatgataagctgggcagcagtttgtgtccatgctgtccctagcatctagacagggtcatttgtgtgaattgaatgagttgcatctgggagttactgacctagtgtgggatttgtagtccatagcaaaatgaattagaaatggtcctacactcattaagctcacagctaggctaagagaagagactgtaggtatatgtcgtcaagtactacagtagaaggaaactagaggcttatggcctccaggtaaagccccggagcactgacaaaggaaacgaagcaggttccttggataggtggccatgttgtgtaagtttctctgtcactatgataaagtacttaaggagcctaaaggagaaagaatgtttggctcagtttagtttcagaagtctcagttctataagttaaattgtggtagaagggcattgaggagagtgtatttacctcatggaggccatgaagcaggaaaaaggtagggcagaatttcagagacagatgtacactgtcgagccacaccactgacacatcctcaaactaggccccacatccccattgctctgaccttgtcctgtcctttacctgctgccgctcagtagcactgccataccctcaacacatgaacttttgggagacactttgtacctacatcttaacaccatgcctgctgtgtgtcttaaggatttatagacatttgccagttagaagaggctggagagctggctcagtggttaagagcactggctgctcttccagaggccccgggtttgattcccagcatccacatgggagctcacaaccatctgtaactccacttgcaggagacccagagtcctttcccgacttccctggcacttggtgcacaggcataaatgcaaacaaatactcatatgcataaagtaaaaacaaaactttgtaaaaaaaaaaaaaaacatacatgcttttggggtgtgtggtaatgcacaccggcaatcctacctcttggcccaggagaccaaagcaaagagatcatgagttcaagaccaaccccacttaccagtgagtgcatatcatgtgagttcttttgtgattgggttacctcactcaggatgatatcctccagatccatccatttgcctaagaatttcataaattcattgtttttaatagctgagtagtactccattgtgtaaatgtacccagcccagaaacttagaatacccaagatacaatttgcaaaacacatgaaagtcaataagaagaaagaccaaagtgtggatactttattcctccttagaatggggaataagatactcatggaaggagttacagagacaaagtttggagctgagatagaaggaaggaccatccagagactgccccacccggggattcatcccataatcagccaccaaacgcagacactattgcatacgccagcaagattttgctgacaggaccctaatatagctgtctcttgtgaggctatgccagtgcctggcaaatacagaagtggacgctcacagtcatctattggattgaacacaggatccccaatggaggagctagagaaagtacccaaggagctgaaggggtctgcagccctataggaggatcaacaatatgaactaaccagtacccccagagcttgtgcctccagctgcatatgtagcagaagatgacctagtcagccatcattgggagaagaggcccttggtcttgcaaagatcatatgccctagtacaggggaatgccagggccaagaagtgggagtgggtgggtaggagagtgggaggtggggggagagtataggggacttttgggatagcatttgaaatgtaaatgaagaagatatctaataaaaaattgtttttttttttttaaagaccaaccccagctacaaggcaagaccctgtcattaaaaataaagttacaagtgcttcagagaagcatggtgggaacaggtatccatatgaagagcaatcccagggaggcatgtgttctctcccacagagaagggagggaggaatccacgggcttagcagcctggtccaagcagtgcttttgttgctgcaacaaagcaccagaaccaaaaagcaagttggggaagaaagggtttatctggcttccccttccatctcactgcacatcactgaagggagtcgggacaagaactcaaacagggcaggcacctggaggcaggagctgatgcagaggccatggagggggctgcttactggattgctttccatgacttactcatcctgtccttatagaacctaggaccaccaagccaggcatggcaccacccacagtgggctgggccctcccctgtcaatcactaaataagaaaattccttacaactggatcttttggagcattttctctgtagaggttccctcctttcagataactctagtttgtctcacattgaaataagacgagccagcacaaccagccccttctcaacttgacatgcaaacacatcagtattgagccacaattcttcctttctcatctaggtctcattaaaatcataaatacctttaaaagtcccacagacttcatacattcaaacacactaaaatttcagtctaaaataatccaatttaatgtttaaagtctttcagctatgggttcctataaaaatcaaaattaaattaaataccttcttcaagaggaaagaaccagtagtgcattatgagccaaactccaacagtataaatagcgcagggtccaattatcttggattctcttgagatcttcggggctcttccaaagagactggggcagttctcctgctctacacacactgctgtgtgtgctagactctggctgcctcactccactgctgctgctgttcttggtgcttttcccatggttctgacttttccccaaaagaccccagaaccctgaggtcttctgctgcaactgggctataccttcaccaatagcccctcataggctctcttcacggtaccaagcttcaacttttgtatgaacccttcaccccttggcctttaactgccactgagactgcactttcaccaatagcctctcacagtgcgaaacctcagctgctctgcatggccacttcatgctctcaaaaccagtaccccatgcttgactcatactaccagtttggctgcctctagagcacagcttgtgtgctgactctcaggaaacttcccagaagatttcacttaacattgctggtctcttcttaaacaccaccaaattctcagctccagcctaccagcactgagtgtcccagcaatgcaaaggtttcgttctggtacttctggtatcttgttaatcacagctagttcttcagccccagctgaaccttaactcaaaacagcaaatggcctcgagagtttttatacttccctctttaacttcatcagctagaccccccatccttctgcactgatttcaacatttgatggctttctagaatattcccaaagcattgatagagtctgtcacagcaataccctaaaatcctggtaccagtttgtcttagtcagggtttctattgctgcaaaacaccatgaccaaaacacaagttgggatagaaagggtttatttggcatatacttaccactgtttatcgatgaaggaagtcaggacaggaactcaaaccatggccatggaggggtgctgcttactggcttgctttccatggcttgctcagcctgctttcttatagaacccaagactatcagcccagggatggcagcaaccacaaagggccttacccatcaatcagtaattaagaacatgccttacagctggatcttatggaggtattttctcagctgcggttccctcctttcagataactctagtttgtgtcaagtagaaataagactagcacagtcgctgaagagaagaggcagtaagatgctaggtcaggaatttaagaagccccccagatcccaaatagggtgtttcccatgagaaccactagggaatctctataggtccctgtccagggaatggtgaggaaggactatactttctgatcgtcaacctgtgggcactggcctgaagagcaagcctgagaagaggccagtgggaggctgttgggaagtcccccaaatgaaaacacacaatgcttagagctagaaaagccagagaatgtgcacttgagttttcaggggagagggcggagaccaaaagcaggagaaaccacagtccacgcaagggagatcgggatgtcttgtaaacaatgctagcatcctatacagagtgataaaacaccatggccagaagaaacctggggaagaagggtttgtgtggcctacagagttatagaccatccatcccttcagggacaacaaagcaggaactcaagcgttagtcacagccaaactcaagagtaaagagaataaatgcatccttgtttgctctcaagtagctttctcctcttttggacccctataagatattcccaggggcttctaggttatgtcaagttgacagttaaaactgtcaagcacaacccccaagaagcaggagcagctatggggcaggagggagtgatgtccagcatctcagggcctggttcccatggacctggatgtcagtcttgcctgtcttgtggccatagttgccagccaggaagccatgtagccatcaaagccagctgtgctctggaaggcaatgctcgtgtcacgccctgaagaaacaactacagcagctgtagagccaggctttgggaaccagggacagcctgccacacagaagacactgtcactgtaccccactggcatgacagcactaaggcatggctaaatgcagtggcactgcctggggacagcaggggtggcagtgcagtgtgaaatggatgtttgctggcagacttgggggtaggggtggggcagtcctgcacaccttggagctggtaaggctagggaagaatttatgaatgaaaggagcaagttaggagaaaagccaaaagagacagtggaaaaagtgcccaggaattcctctgcctgcttccatcccctcttcctgaactcatctctgcttccatcagagtaagaagagagctaggctgggaggtcccttcagacaaacacctggtagccctgttgctgcaaggggtctgcacagtccctcagggcccatggagcatgctggaatcaggtagccaggagggctctgataggttagctgggaagcttcattaaagattgacaaagtgaagcccacttgcccacaggacagcatatcagttaccactgcaccagccaggcggctgaggaagaggaggtaagtggccaggatgcgcaaggcaccttgcagactgtgcggaggagctctgccggtaatggtcagcagggagtggacctttcactgcttctgcttctgccactgtgactgcaccgtgctttgcagagtgacctgtaggtgatggagctctccccttccttcctgctcctcctgggattcctctctcccaactgctggggctggggtaggggggctgagtgctgcatcctggggagagcatctccccctgagtctagggtccttgcagaattggcaggataaactagcatcgggaggcctggacttctgctctagctgcactgcccagtggaggcctgatcactccagaggcaagatgtcctccattcccaagttgagtctaagtttccctagctgtaaaggaaaattaatacatcctatttgagaattgagaaaattaatcccctaaagtgatatgaaaatgctttgtaagccacaaaaatgtagtagatggttactgtaatcctgtttgaggttcattttaagattaatattgtgatccttaacgagttattaggaaagggggcgaggggatggtattagaagagctacttgcctaaggagatcacctgaacaagccaagcccgtgggtggggtgctctgacctgagaactggaggctggattctggctctgtgttgtctctgatgtggacataaccttgagcaaactgctgccctattgctgggtctccatgtaaggaggaggaccagagaggaatactcactgacaccaggtctctgtctgtcatcggtctcctctctgcatgttatttctgaagctcaatggcacagtctagtgatctcttttctctgtgtggcctgggcttctaccttcttggaagcagtctccctgtctgtaagagagactctccatgccacagggctgtcgcagtccatgctctcgggccagacacgatctgcttgtctagttgctgagttgtaactgctcagcccagtgccagggctcaggggtgaggaaatgttgctggaggaccagaggtagcaggtcagcaggcaaagatgtgatctgagcgtaacagccagtggccattagccatcatgggcctaaattgctgtgccagagactagtcagatctctgtgagttacagaccagctaaatagcaagctccaggccatagagtaacacagtgagaccctgtctcaaaaaacaaaaatgtggaaggtggggacactcaagcatttgtcctttcgtgagcttgacacaggagttgtctttgctttgtaagtatggatgtggaggcatttgtgtaccaggactgaggatagtacgagtatactagaaggctcgtgggctgggggacattgtcctgggagctggccccagtcctcctacccattcctatgtggcttgggcctggtaactctctgtctatgtaagtaagactcccttcctacacagacacttgtttatgtagcagcaggaagagcgccatacaggcggaagggcctagtctctagccaaaagggaaagaggaaaaacaggcagctagaaagatggtagcaagggaagcagagagcaactcaagaggccttgggcagctgcccagctcagagcaggcagctgtcgtttgctggccagaaattacatcaggcctcactgagcgggtacgggtcctttgtctctggcactcctgggatctcaggttccatcttttcagaagcccaagagatacctttcctaacaaggagagctggaaacttagcctgggctctgtcccagaggagttgaggctgctgtccagagtgtcatttggtggggagggagggagcagagccttcattaggagcaggtgtcagccttgcctcctctgacacccggccggccggggactggagggacttgtaaccactttgttacctgtctcaaaggtggtacctgctactcatgcataatttggaaattcaaaataaggagaaatccccatgatcctaagatacccactattaataatttggtatgttttcttgtttgtccttttgaattgtagatatttggaggctggagtagctcggttgctcaatggcagagcacttgtcccagacttaatccccagaaccaaaggcagggtgggagggttggagataaatggtccttatttctatctttcacatgtataagaaactgaggtacaaagaaggaaggaagccttaattacttagaggcaaacccagcaaagacccaggaggctagcagttcaagaccagcctgagctatatagtgagaccttgtctcaaaatgtaaaaattaaatacaggggataaaatcaccctggagagtacacgagtacagccaggaatgggaaggggctgaaaggtgaggtggaggactagtgggaggactggaagagcagagcttggtctcctacacaacaccccttctaattccatcagacttcaaggcacagctctgagcagacagttttcatccatgaagagaaggccttcctgcgtaggatccaggacatgggactaaaggcaggcaccaccagcaagcttactgaggcttgaagaagctgtgaaggatggaggaggttgctcttacctgcctgtcacctccagtggatccctgtgtgcttctgccctgcctagtgctgagctcactctcagagattcagtctcctgactcccaccatgttccagctatactctgctctgtcctctccagccagagcatctctccttctgtcattctgcttcctgtggtcccatgggtggagatgcccttctcactctcctcttgtttattttctgacatgatccccaccatgtgaccttcaaggataaaggacatcctctgatttgccaggtctttgggaagtgtgagtgagtagttgtacttgaggctagaaagcagaccttcccaacatcaagcagccagtccttcctaagaaccgtcatagcttgaagcagagaagctcggattccagttccgcctgaggcccagcctctatgctagcagctctctgtgttccgagaggaagggtgtcaggaggtagttctcctagctcttctcttctgcctcttgcctggcttgctgctgggagtaaggcccactatgggggctggacctacaggggtcaggcatgccctgcaggggttgcaggtgtacacaccactcctggctttacgtgacgctaaagatcgggtcttcaagcttgtgcagcaagcacatcacccactgaactatacccctacacagccacccttgattccagctccaagggatccaatgccctctctggccttcatggtgcccattctcatgtaacagatacagatacatacacataaataaacataaaatgaatcctttttttaaaatacccttaaggcaggcatggtggtgcaggccttcggtcccagcactttgggaggcagaggcaagtggatatctatgagttcaagaccaacctagtctacagaatgaattccagggcatccagagctgttgaacagagaatccctgtcttgaaaaaccaaccaaccaaactaactaaaataaaataaatatccttaaatactgagttgtagaaggtattggggggcgggatcagggaccctccttctcttcacccctatcctgcagggtcacagctcagcccaggaggcaagaggtgacaccgtgagtccaccatcttggcctgtggttacagccataagggaagttatctgcagtagctcagcacaggatggatgaccatagctttcttgttgacatctactcccacttgagaaatgctgcctagctggagaggcccctgttaagtgagctcttctccagggcttctcaggagaccagcaaccattatagaagaagaaacctcctcccagcccttctgtcagaatctgccatggcacatgtggttggaaaatggattaggaaagatggcctcacatgtacaagagcatcttttcctgctcaggatagagcaccaggcttggaagggactgtggctcctgatggccttccccagctttctgtagtagcaggttagctgagggtgtagggagtctaggtcagcatgaagactgagaagaccaagtaaatgacagcagcacactgtgagcatatctgctctcagagcgtcttaacaggaaaagaaacaaccatagtaaccaagccaggccagaagctgagcagaccttgcatcatcagccagtgtggaccaggcattccgggtcttagtcataaggtgggacaaagcctcagacaaggagcaacacaaggttgccagaataggaacttggcctccagaaggaggaaagcagtctagacccagggtgagttcagttgttcaagcttgaacctaaagcctatgtagtagtgacctgtgtgctgctgtaagacagcaccataagcaaaagcagctcactcactttggctcccatagagcttgtcatggtgggaaggggtggaggcaggagcagagcacccccataacacacttcctgcagcaaggtcacgcctcctaaacctcccccaacaccacctctaactggtgaccaggtgttcacgtagccagagctgtggaggacatttctcatttaaacctccacagccttggccaggctaagagcagagtcccagaatgttgggctgaggcattgtgaaacctgccttcaccagaatgagcaaggcagaggtcaagcaactcctttctgctatgcagacacaagtctgcacctgaatgctccgtccagggatggggcagcttggggcactataggtggcacgtgagtccaccatctcactcttcaagccagtctgactgacaccatgctgaaactggacttgagaatgagacaggtgctgtggcaggggctttgtcttgctctgcttcttgcacctttgagcaagttacctaacttcctgggcctggcttccttggtggtcccaagtccttcctcatgggcactctcctagctgtgtgagaattacagttgaaatctaggttgagtaaaagttgtctgggaattgctctgatcaggctcccataggaaataacattttttttttttttttttttttttttgggtttttcgagacagggtttctctgtatagccctggctgtcctggaactcactctgtagaccaggctggcctcgaactcagaaatccgcctgcctctgcctcccaagtgctgggattaaaggcgtgcgccaccacgcccggctaggaaataacattttctgtacagaagaagaggaagaccactaagaccctgggcttctgggaagtgagtggctaaagagactacctgctgtctgaggtgtagattcacgctcacttcacccaaaagtggaaacaaagctgtttgcacaagccactggttacacttacaaagggacgatgcgcactggccctcgggaatgatcagctctttcttgggttggagctgcagcctggatttctctttaaatatgggtcccagcactagccctcctgagaacaggaggttcagcagtgggactctatcctttcaggtccaaagtgggtatggcctaggagctttcatggtggcccagaacaaagggagccgtgcagggttgcactgcctcttcccacagccccagactcccagtgtgagtaacaggtccaaggagggtccaccccacacacgtgtagttcctaggttccatctggccttgatcgtcaccagctgaaggtattagtccttcactcatgattcttaacataccagggttggggttgaggagacagtggcaagtgggcagacacagcaggtgctgtttaaacaaaagcagagtggtgtgagcagaacttagtttccactgtgcttcagagggagagccacaggaaacagagagagataaaggtgtgcaggtgcttcacgggtgtgagagcccactgttagaggcaggcaggatctctcctctgggctctggagggtggagagggtgccattacagttctgtgttggggcccttcttccctcctctgacctttccactctgcatctcttccctacaggcccctccacacagcgtcaggtgcagaatggcccctctcctgaggagatggacatccagagaaggtaaccccacgtcccacagatgtctgactgaaagctccccagtagagctgaggccactaacaacaggggcaacagaggatgcctgcacatgccactgcagactaaggggacaggtccatcgcccacagactcatacttccctaaactccttctgaagcttgcctagtaaccctgtggttccagggagccctctaaaggactaaaatgaggcatagcttccatttctcctgccaccacagtggctccaaacagccagacaagcccattggcccactcacgccactgagtgaattcagttggccagagggtcacacaggtttctctgaggtatttactactcagtgtgtccagctcatcagtcctcttccatctgtctctgtctctgttggaggcagcccagggctacaggaaggttagctcagccagtgacgtgcttgcagggcgctgagtagagctccagcactcttttgttttgttttgttttgttttccttaaaaagttagatgtggcatcagccacttgaataccagagtttaggaggcaaaggcaaacagacaaaccctggtgttcattggccagccagccttgcctacttgctaagttctagatcaattagagaccctttctgaaaagaaaaggaaaggaaaggaaaggaaaggaaaggaaaggaaaggaaaggaaaggaaaggaaaggaaaggaaaggaaagaaagccgggcatggtggcgcacgcctttaatcccagtccttaggaggcagaggcaggcggatttttgagttcgaggccagcctggtctacagagtgagttccaggacagccagggctacacagagaaaccctgtctcgaaaacccaaaaaaaaaaaaaaaaaaaaaaaaaaagaaaagaaaagagaagaaagtgggtggtgcctatgacagcactcagggtaatcctttttcctccacacaaacaaagcccagtgttatgggtatgagaagtaccacagcagcagcttttaaatgtgggagcgtgggcacagagagctcaaggtgtctgctgtgattgctttccagacaagtaatggagcagcagcaccgccaggagtctctggagaggagaatctcggccacaggtaggggagactccctcctccagccctgtccgaggccctgaccccccagtgcatcctcatggcaaaccaccttacctgcttttccaacaccctgtcctctcagctgctgcagcacctccctcccctccgctgcccaggcctctgaacatggcttgagcaagtctagttctaccagcatgtctccctcccatacgtcccatcctcttggctcagcactacttccttcactgtcctgacatcacctctcctgtgtgttcccagctctgtagggcagtcatccaagagcttcagctccgacaggcttcctgtgcatacttctagtagagcgagccttgcagcacaagtctgtgttctcctctgtgatttgttggctgaccttactagaccaaaagcaccctgagggtctactcccctcagtgtatggcacagtgtctgattcactggaggtgcctgactaggtgcatagtggaggccagccctcggtggttccttgacccaaattcctggtcatctctggacccacagttccttacctcttagagaccctaggatccaagtacaagtcccacttacatcttgagaccaacttcagtcagtacctaagatgcagccaagtacttataatggaaaccggcactgccaggaactcctcacacacactggagaggcaggagcagagcaagaggagctctgctgtgctcaagggtgttaagtgactatatgccagtgtagccagcacccaatgctgggagattggaataggaagggattgtaatggggctgggttctgtagggccttcctgagacaaactcttctgcacctcatctctgatgagcaagctgccctccaatcttttgaaggacccagaataaaaacagtagctggacacccctaggtgttggagactgactcctcccctttgcttttcagggcccattctcccccctgggcatccctcatcggcagccagcaccactctctcctgtagtggacctccacccccgcctccacccccagttccacctccacccacagggtctactcccccacccccacccccactgccagctggaggagcccaggggaccaaccatgatgagagctctgcatcaggactggctgctgctctggcgggagccaagctaaggagggtgcagcgggtaagagttcctgtcagggtaggcaggccagccaccctttacgtatcactctcatctctcaccctgtcctcacctgttcatcagtgagacactgagcaaaactctcttcccctggatcagctcccagctgccttagttaataagtactgaatctgcccttgcttttcccgtggaatgtgcttccagttgattcagctccccaccccgggtgcacatgctcctggaaagatctgcagataatataagtctgctcataaaagaatgctctgatgcatatctctggcttgaaagttgcttccctcctccctgtaactaactggctttggcaaggactcatgcctgtgggcctaccaagcctgtccctgagcctccctagattctggttttccgtggacttgagagtgttaaactagcagcctcactcctaggatctttctgggtcagcatctgacacacacttcttccttaccctcagccagaagatgcatctggaggctccagtcctagtgggacttcaaagtccgatgccaaccgggcaagcagtgggggaggtggaggaggcctcatggaagaaatgaacaagctgctggctaagaggtgagtacagtgcctcctagaggaagccactgtcctcagctgaatgtcattgctaagacacatttagggggcctagaacagcacccgctgcacttgagagacaagcaaggggctggagagatggctcagcagttaagagcactgactgctcttccagaagtccaagttcaattcccagcaaccacatggtggctcacgaccatctgtaatgagatctgatgccctctaataatgtgtctaaagacagcgacagtgtactcacatacatgaaataaataaattacaaaaaaaaaaaaaattaaaaaaaaagaagaaaaagaaactgagagacaaacaaatacaacacagtcccagagttttagagcactgcctacagacaccccactgcccccaacactgcttctgtaggcagcgttagccttcccagacctcctaaacagtctaggcagacatgaagcagccttcacagaacagtatgttaaggcctgcaagaggaagagacgggtctcacagaagaggctctacctgtcctctgcttaaagaagtgcagttccatgggctgagggtggcagaggtgccagccgggcagtgttcaagcacaggctgagaagccggcacatggaagagtggaggaggccagctggagaggaggctgaaagagtgcctcactgcccagctggatctcagagctgaatagggcttcagataacaggagaaaacattttagaaaagaaaatgtttgtaccctccttcaatctaagaccagtgagcttaacaacttggcttggatgatgtatcccaaaacacaggatctctaaaaacaggaaaaggttagagttgccaggagccaagcagacgccaggtgctgggggggtcggaggtggggtccaggcactaaaaaagcaaatgtgccttgcacagtctgcaaggaacaaccaagcaagtctttgaaatctgcttcatgagattagcagtcctgcagctttttctcctgcttctcttctagcagggctccacctacagtggagaagtcacaggtgagcacctcctgagggctgctgtgctggcacaggcacatacgtgcctctcaggaggcactcaccagtgtagactgcagtggcttggtctgtattgtctgtgtgatggaacacatgcccgatcacatgttaggcaaatgactacctctgagtagtccgcacaggcgtccctctgattttaagagatggaatgtggcttctgggcatcagtgggcatcatggggtaaagcgactaggcagaccagtgaagaaacctttgtcacccaggaagaggtgatgacagctgccgtggaataggcaaaggttaagctaggccagagtgggaagaaatagagagagagaattgatgaacttactggtcctagtctgtgggaggaataatttgtcagaggccagtttccacaggtcaggggaaactgaggcaggtgtagaatcagtgattgatcattcagcagacttttctctgagggcggaaacttgatttactggagccagtgagaaactctttggagctggcaaaaaaaggaggagaagattcacacacacacatacacagacacacatatacacacatacacacacacataaacacacactcacacagacacacatatacacacatacacacacacataaacacatacagacacacatacacagaaatacaaacacataaacacacacacatacacagagatacaaacacacagacaccacacacatacatatacacacacacacacatatatatatgtatatgtatacatatatatataacaactattttttcttccacaatttatatatcctaacaaaatctttcaaatggtacaaaatgaatcacaatgtgattaccttctatttttcattaagtgatccattacagtgagtattcatagaaaaacatatttaccaatactctcacatgaataaacttttcttagaacaggttaaacagtacaggtttaaaacaacaacaacagattattcccaagaacccacatgcattcataactaagcaacttgttatagattaacaaaataaaagcaagcaaaataattttctcagccagtttctcttactggcaggctgcaatttgcagttacaaagaaagaattattatttatctttaaaaataatgataaaatcttaagagaatcataaatctaaacttttatgtaaaaaacagtcatttttattttaagtccccagggtgcatctactcattaacgatttttttcattaagtaacatcaggaagctagggcaaaggtgagtacaagaaattagtcatcaccttgctcgccagcccagcctcgggaaggaagaggtgcatcagctaggaccagtcaggctaccattgtttcttgttccctgtcctcaaaaaaattccctcactcaactattaatagttttactttctgaccttcaaattgttccccaaggccactaacaatctatatctctaaattccttctaagggtggtggttgaatcgtttatctgctccagtatcgatgcttgacaaagctccattattattactgtgagtggcagtgacactgcccagtgaggctggacgcccctcaaagtttcctgcactcatggactgtgaggcagccacagcagctgcgccgaggcacgggcacagccatcgtgcttgtgctagctggctatggtggaccagtccatgagttctaaagctattttgctgttcctctttcttgccccatcctgagacagcttgtgtgaaccctgccacaggcagccggagacaggtcctcagcacatacaggctcacttcactccaggtgggctgctcacctcaggttatgagaggcctcacagttgaagatgcactggagcacattgctgggaagtagaggcctgtatctacacctgggaggaagcagatgcaggtgacatgagacctggatgcaccaataaagttagagtcctgtagaagattcatgcgtaagaggaaaatgcaggagttgagtatagaagagccctgcagctctcctgggtgcttttagctccttaatgtttttctagaccggaaagggcgtggctagcttaactgaggtccaggacacaagtgtggcaagagaaaatcttacccattgtgacatgatgctagagctgaggttcttcagctgcaaaaaaaagcttcccacagctctgactcaaaagagacagaccggtccaggattccagtccatctgcaggccttaagtaaccctgtcccctgggggacctaaacactaccatgtttctccctcagaaacgatggccaccaccagctcagtaagcaaagaaacaccccaagtgcttacttcctgcccagaccagttttgagtgtaggtcataggtgagtatagaaagtcttagccactagccttagctcatgaaagtagggtgcctaacgagtggcctgtccacataagccagcattctaagctacacacagtctgtcagggaaccaagtgtgagtagaggcagctcagagttcccgtccacgggggaccttgggaagctgatttgtatttttttttctccccaacatctaggagaaaggcagcctcccagacagacaagcccgctgacagaaaggaagatgagagccaaacggtaggcaccactctacccagccggcccacaccgtcaggcctgcctctggtgtaagcacatctcccggtgaggtcaccggaagctgagtacctggtttagacacagctgtgagggagggacagggatcccgtcaagcttcaggcccagacaggcttgcatctcctgagaattcttttgaccagacccttggagccatcattcagcagggaaagcagaagtagacaggaaagtcccggccagcaggagtgcttagagaatcccagggaactcaggaccattatgctccagcatgccagggctgcatcaaagggactggaaccatctactgaagcctgaagtcagagtggtcttatttcaagttacttatagttctaaacacaccacttgagtatccatcaagcccagtgggagctgtgctccccagccatggcagggttctggaaccctggactctagtccctggcaggcatgtggagattggtctgtcagcacagagctcttagcctcaacttctatttatggtgaccatttttttttaatgtacacgataagctttcttattttaaaaaaaaaaaaaaaaaaaaaaaaaaagagccgagcgtggtgacacatgcctttaaacccagcacttaggaggcagaggcaggcggatttctgagttcgagaccagcctggtctacaaagtgagttccaggacagccaggtctatacagagaaaccctgtcccgaaaaaccaaaataataataataataattaatggcattctaccgggattgctgagtaaaagcctctaatacaaacagcatgaaggctgcctgcctggtcttccttacatgcttagccactgaggtgggtctggtgcccctgggctctaggcctccctgccagtctgttctcctcattcagtctacacacaagccacttcactaggcctgggcatgtgtagtgctttgtgctcaccagatggcctctctcagcctgtacctgctgcatgagccttactgagaatggcctgcctctcagacctcagcttaggaaggtcaccctcactccccagctctctgcttctgccatgcccttcatacagacagggctgccttgcagaactatctagggaccaaaatggggttctcacccaactgccctgtgtcttcgatccctgtggccttaagccagatttgctggccagtgccactggatatttacatgggtgtgttgggcctcggattgcagagtcagcactggcttttcttaggtgccgcaagtactcgctagcctcagcttcagaatccgtcgggccatagagccttaaggagtggctttcattagtgaggctctgttgaaaccctcgtcgggcctcattttctcaccttttaaaaaaaaagggggggcagatcttctgtataaataagacctgggcagggtgctttcctgaggtccctgcttcactgtctccagcctagtgatgtaaggattgtgctcttgactgagagacatagactgagcctatgccttgaggacatgcgggaagcaagctggcgcagaggtaccctaccttgttgctagcagactaatgacaggaccttctctctcactttaggaagaccctagcacctccccatccccaggtacccgagccaccagccagccacctaattcctcaggtaagagggtacctaccctacaagtcttgagatcttagagcaagcagtcagctgatatggccacttcagtctatggataagagcatcagatctactgaattccaggtcctcagagcttccacacttccccagggagcccaagcagacagctaggcaggtgtggcaaggggcccttgatctggtccagctaaggggaaaacaccaacaattccattcacagtggacactcagcggtgctggggttttaaccatccagagcctccacacattagtctagcaagctaccacgctactgcttagccaccccctgaccaagaagctatttaatgtcatacttggtttctcctgtgtaatgccaactagactaatgctacagttagatcaccaatccacctttctctaccagaagcacaacccctgaccctgccccagtccctacagtcagctgtggcccccggtttgtgattaggacagtgttatgagacttagctaagggacaagacccagaagctggcttcaactagccacacactcattgtcagcttcgagccaagcctggggctcatgaatgtgggaagtgaagcagaggagtcaggtcgcccactgaacagatagatgctcttgtcagcttttgttcacaccagtgtgcatgtgtccagccttcctggacttcctggagtgctgctgcctacattagatggcttgctcattgtcactgtcctcatttccctactgtgggttacggggatttcctatgcttagcagcctttgactacccacggccaagcattctgcttgaggccacacacctggaggatggctgtggtccagatcttgtttctataggccccgtgcaccacacacctggaggatggctgtggtccagatcttgtttctataggccccgtgcacctgccaggtggctttgaggtaacctgcctcagacctgcggttgctctgcagacaaggctcagcttagggcaggacaacccaatgtcccttcgcttgttctgctcagttcagtctttctcctgtgaattgaaacatgaattgtaatctagtccaacaaaggttgagtattcacagtccaaaaatgcaaaatgctccaaattctaaaacttgcagtgaatttcatatgaactctgaatctgcaataaccactggttccaggcatccgtatgaggcgccctcagcctgtacactaaacttagaaaagggaaagctacttcaggctcaggaaggaagcaggccagactcagtgtgaagagactagtgggcagaggttcagtgggatccaggaagcctggccaccggagatataccaggacaagaccgatgagagtgttggctcatatccctgcctgctcatttgtagctggagttgccgcttccctaccagctgaatcgagttctatgtagaatactcaggtttcaagggaatagtggggaatgcggtgacagcaggctacctacagttcctgatgaaagaggactgagactcggggccaggttgcagctctactcttagcagctcccactgtggctctgcaccaaagtctgatagactcctgcagagaggacttgggagtgggtgacactgaatcttctcagctctgatccttcatgaaatgaattggcagaggctggcagaaaaccctgggaacggagcaactcggtggagaaacctgtgtcctcgttgctgtccaggtgagctgttctgggaagggccaagagactgctctgcgggcaggatctggtaccggttcacatgtctctttcattccatgccgtagaaccccgtctgtggcaaagagccccgaagctaagagcccccttcagtcgcagcctcactctaggtaccgacaaccctcctgcccatgtgttgcccaggctctgcggtctcctctgtcccctggctcatgactaacacccccaaccctgtcttgtgtcttagtattaacaacttgctctgggaagggtagtctgctctttcagacctggagagaggcaaaactagaggccatcataggggtgtaggctggcttcctctcctaagaagagaaggcccgggctctgcagaggcatgactgacagaggagagagaagcaaacccaagcagtcagtccctgccaccagcaccctgtcctttcagatcgtctctgcatgcagctcgcatagtcggccttcttgaaagtcagcttctcctgtccttgtttcccaaaccaaatgccaatataacagcaggatagaccattgagaactcagctcacccaaaagacaaagatggtaactgaagccaaatatgcctgcatttgaaggtccatgagcctgtagcaggcaatctctctactggccaccccaatgggagcaagcagctcttgtcacagagcaggtgactacagaagccaggcctgcagagtaaaacaaagtggtgagcaagagctctagcccagccctgacaggcaggccatgggagccaggctgcgtgccagggacagctgtggtccctagaagctccaggccacattgagggcaatgatggtctgcgtggaagctctagagaggggttggccatgcctctgagtgagagaatgtgctgccgagattcaggaagcagccatcaaccggaagagatggaagatggtagtgccttgaacacagccacccaagcaaagttgaagaacaggcagtgtggctagaggcagaaagactgaccatgagcactcaggcaagctgatttcccacacgaatgctccctgcagaacacctgacacagaaaaggagggctggcagagacctgtggtcttcctcagagctagtcctcactgccgtggcttctcagagaatgctcccacctcctcagtgtccttccctggacagacacatggccaaggcctctcttcaagaatgaaatttcgccgggcagtggtggcgttcgtctttaatcccagcaattgagaggcagaggcaggcggatttctgagttcgaggccagcctagtctacagagtgagttccaggacagccagggctatacagagaaaccctgtctcaaaaaaaaaaaaaaaaaaaagaatgaaatctctttgcagcttcaggcaaaatctgatctccagtgtttttgttatgattcatttccaccctctcctttctctcttgctatctttttaattttttaaaattcactttacatccagatcacagccccactccctctctcttcccagttccacccttacaaactcctcccctcattgccccttccccttctcctcagagaaggaagcccccctcccaccttggtagcatcccaccttgggcatctagtcccagcactggtctctagttttactgaaaatgtacagtaaccacttgctcacagcatacatgctgctcatgatggctgctgtgtggacgagggacagctgaggcatagagagtaagctagatgattcaggtccccagcagtcactgctgagatggcacctgcagcccattgggaggacctgaagcttgggtgtgtttgcctgtcaggacccagaattcccggtagacctgttcagcaccataactgacttcattttcagcctcttctcccaaactttggagatcagtggccctcactctcctaatatcaccccttatacagcaagttgtccccataaatggacattgaaattccatcatatcccacatgcttccacctcctcagtgtccttccctgggcagacacatggccaaggcctctctccaagaatgaaatcccttacctgattccagcctcatccctttccctggagccacaggcttcagagctcttctctccacatggacagaggattgggtccagactctgtctgctgtcagcaccccaccatgtcctgaaagacccccgagctagattcacattgtggctagtgagtatctgggagagtgcctgtgcacaaggcattgacgttcagatcaatgatgtcagtccagagcttgttcaaagtataaccaataagaaggagcaaagcacatccttgaatgcttcaggaagagcagaagtaagggagccacttcctgcccagggagtgctagctgaagtgctaccccagcatggagataactacagtttcatcaattctggttgatttcaccaaccagagttcagctaggaacacgagctcctggtggcagaagacatgattagtaccacccctcctcagtgaggcaggaggcacagacgcagtctggctcagttgcctactctgcataaggcctttcaagccagaagactgttcctgtatgaccccatgtcctgacttagacttggaaatgtggttaagggattgtggagagacctttcagaggcaggacttgcacagcctttcccagcagccctaggtaaaatacagcagaagggcaggggagcccaaaggagggaactctgacaccccagggctccccagcataggtgcctatagaccctggcaaccaccttcccattccagggtgaagcctgctgggagtgtgaatgacgtgggcctggatgccttagatttggaccggatgaaacaggtgagagccgggggactgggggtgggggggggccagtcagcaggctgaggactagctctactccagtgggtctcatacttgactgccacaaaggcaggaacctagccnnnnnnnnnnnnnnnnnnnnctgagttccctgcagcctgcttctggaacccctccctgtgggcagccatcataaactgaggggtggtgagggcagggtttgcccagggccaggctgagggaaagagccctgcagcatacccctggagccagcgtctgtcccttcactgtgaggctctgcccagcaggagatcctggaggaggtggttcgggagctgcacaaggtgaaggaggagatcattgatggtgagtggacctcagccagggtgcgctcactgccctcccagcaccccactcgccccagtgagcagccctggaaacaggtgcagaaaaacaaagtgctttaccaagactgcatttctcgctgggtgtggcttctgtgtctgagacctccctctcctcagcatcctctcagatcacgtgtgcaggagagggtgggtgtggaaacaccccctagtttctgtcctttcctgttcacatctgttgcctgcccagccctgccaatgctgcctcaggagggcgatgagcttccttacagcctgcatgatcctgtgtatgagcagacatggtgttctctccttcccagaagagctctgggaaactaaaaactgagactgtgacccttgtgtcgcacctgaccccaccagggcctttgagggatgacttgggctggaacagagcagcaaatcatagcctgcgtctgcacctatgcctgctgcccacgtgctgcctcgcttctcactggttcccaggccagcagcagtgattgtcctagaaaggcctatgaagccagaggggcagctaatgacagactcccatggggaagatgtactgtgaggacctggtggccagtctctatagcagctacaacccttggccacagagggcgcaagtcctgtctgtccagtcctactggaatacaggtctgagcgttcatgaatgcagggaaggaagcagcacagctaaagaatagttggctgccaggcacttccagcttccgggtggggcagggcagggcgggtttgggaggggctccctttctggcacttgggaaaatagctgagtaggaaacactgagtgcaacaggccatcttcaagacagctagctacctgggaagagacagggagtggtaagacatgatgagtactgtccctctgcagggaggcaggggcacagaagtcactgctctcctgtcactgcttcagtcactgcctgccatcaccgtgtaggtccatgctctgagcccctggaaagtatgtgagggtcctgaacctgcagagatcccattacttaacggtgaccctgctccagccatgtctgtccactgggaggataccagaggcctgtgaaagagggagggagagtgtggggagctaagcaatggggtgcagaatgagggggccggaagaagaaaggaggcatttgggaggacttaacagatgttcaggtgtccagaacagaacctgtcctagaggagaaaggccaggccatggtactagcatagtccataacagctctgcagccagagactcccgctctatcacatacacctctgagtggatgtcagaatcagggaaactctgggtccctcctacaagcagcccaacccagctctggggtgaggcatagtttttggctttttcacgttcctgtctttagtgggtagaagcccatgagggctaggtttcctccccaaaggtctgtatcagagctgccatgctgctgggcctctagcccatgtgtgcccatggcagcctgagcagggtccttccttctacactgagcccgctctcctgtcctgcccttagccatcaggcaggagctaagtgggatcagcaccacgtaagatggcaccagtcctggaggattgcgaggagccgtgctggccccagcgagcatcgagcctgcagaagctgggatgtacttaagtctcaacctgtgatacaatcttaaaatgaggaaacaaacttcaactcctggattttttagtgtatctgacacagaacaccgggtctattcttttttttgtattttatatttgcttatttaagtgtacgttcctttggtttatagagaacacccccaaatcacctgctttattagatggcttccaagttttctcctatgtgacactgttggtgcctcagctgacagggagcagctgggtgcagtgtggcctttccatgccacagagctgtcagaatgcagcacagctccagcagccacggtgttgcagtctgtctgtccacgcagtgcgcgttgtgtccacacaataataaactgttcactgtccaaactcaggctctggctcactctcacgcgccggctcttggctgccctggtggaaatgtgcaggccagagcatgcgaggataacaggagaaagagggggcctcagaaagcagctgggctccatcaaaacagccccaggagggtagacaggttaccaggcacctcctactggtagagctgagccccaggtcctgcacacagccccagtgtttcaggtgggtgggctgtgaggactccatgttcattgtgtcaggtgtcagaagtggtcctgaggctcagtgaggccacaggaggcttccaccacccagactccctgattcctgtgacactgccagaaacaatccatggccacccagggagggtcccagcacttaatctccattgtggctacagggagcctctggctcttgatgtcaagggtcatgtcaatatggccaggagagtagccatggggaccttgtgaactccaatggccaccaggaccttagaacagggtgcctgctcagtgctggggctgggtaggagaggctggggtgaggtctacagcacatctcttctcactgggttccagtcatcctaaaggccaggaatgtgagagaaaaaaaacggagcagctttaggaggcctggccaaggcagcacaccccacattcctgagaggaacattgctatagccctcacagcatctgtcaaaatgccctcagcacagctcgttcacggcaccttcggaagtacagttaagccccataccagcctccgacgtgagagggcgtctcaacacagcctatgacactatctacagaagagggctggctggcctggctgaagtgacgcacatccaggagattagggtggcagctggcctcactggcattcccctccgtccctggattagcctgtgtgcacagggcggggctacctgccctggctcaaagtcctatctcaggagtccttagaccaggtcttctaagtcatctcagtcactattcagggccacctgttcctagaaccacagaggccactcctaagcatgaggcaatggctgtggcacaccctccctccctggcctcctttgtggtggtgtccttggtcaagcctgccacctcaagcttaggctatagtgggagcggtaaggctggacccactcttgtgtctctctaccaaggcatcctcttccagcacgctgctgctacctgttttggacatcaggaccaaccatggtccagcctaaggctggtctagtcactaaggctgcctctttaaccacagataagccatcacatcagtatttgtgccccatccctgactcacacacaagcccagccagccatctgacttgggagccagttccatgtaggatggggtgagatgaaccccatgccgtcaacgtgacctggccctgttcagatatatggactcaatgctgccagcctgaccctagccgagcctagggttccacaagtcagagggcctaaagtggaactgtttcgtggcatggagggagggcccttcagcagcccatacatagatgttcctccacattggtggatgcctcgggccttctagagcctaagggagtgacttgggcatggggcttgctaaaaggagctacacaggtgctggactcaacctatttggattcaggcttcattctctgggagcccaggttcaggccaagactccatcctgcccaaaagaaggaaaacacatagactataaaggcatattagatttaatttcgggcatagaggaaggcagctccgtgggactgcctgctccgtaacctggtcagtcatagctaagacccagaaagttcaggtaagcctggttactctgtatctatctacttgctgggcacaacagacccagaagcagcttagactgcagaagctgatgcaggcacacgggcaggaggcgtatggctgctcgatctggactactggtcggcagggctcacaggtggtccttcgccagcttacacttgcgcttaaccctggagtagggtcccatagagtcctcaaatacgaagtcccagagcactttcacccaggagtggtgctgcggcaggtggtcataatattcaggtgcaatcttccgcacctgtggaaaggggttggggtcaagactgcaccttgactggttagtgagtaaacacacacactcatacacgtaatcagggtgtgtcttctatgagcctgcagagttctgagaccaacgccctgccggccttgggtcctaccctcatccctcactccaacatcctgtgctctgccagcctccgagcctcaccaccgttcactgtttcctaagcaatcacacttcccccagggagtgctgcagccacagcacctatataaccaaactcccgcagtgctggagagattgtcttcctgccttcctagggaagccatcactgtgtctagtgggcccagcagacagccttctctcctgtggagagcaagtgctctgtgaaaggctcctgtcagaggcggcctcagtcgagactcaggcttggctcctgagatgtactgtcccctcctcttaacctctgccctcatttcaaatgtatatttgagtgtgactgttgtggaggggtcagacagcttcgtagttgcatgaacacatcaccgggacaaccaaaggcatccagcccatcaatgtacacatactagacacattcacacacacacatgcacacacgcacatgcacacacacacatacacacacacacacacacacggcacccaaggagggcatacacaaacatactcagaacaggagccccctcccccactgctgccccttgcacacctacctaacattcaaaacctccagtccctctatttcagcctcaacacccctcctccacctcagtctcccttcccttcttattagcttcccctccctgtcactacagccagaacccataggatgcaaggacaagatccacacctgtgctgcctggccagctccaagcggggcacagtatgcctctactgtcccaaggctgtgataagaaattagcacccacaggcaggaggtaagaagcagggtacttctcacagtgtccactgatacagaaaaggaagctgaaaatggggcaagcacttgaccaggaacacaccagagcccatcagccaggttccagcagtatactaacctaagctgctaacctgcactcgcttaggaaactctgccctctatggatctgcctcctccatctccagtcactggcttacgtggtatagcttttccaaaagtgtataaccatccccttacaagcacacaaaagaaaggcagccagggaatagccagagcccttcccatcactccccactcctcccatgccagctcagcctgggttgagcacttaccagtggcaggtagtaaccggggatactggggaagtcgtggtgttccatgtggtaacccacattgaaggtgatccaattgaggggtccatagtaggagtaagtctcgtggcccttcaggaacatataatgctcagccacaaagtgaccagagatagggtgcaggcccagacccaggaggctgctgcctagaaggtagactatgggcttgatcccccagagggcaaagatggtgacatcaaatgctagctgcaccagggcgttgaggatctccatacgtgtcactaccttggggttcacacagagaggccttagtgaatagaagaaaggctgaagcaccagccagagcagcttgcgggccggcgtgcagaagaaccagccctcgaagttcgtaggaatatccacatccagcccgtctccacccaggtaacgatggtggtccacatggtactttttgaaggatgtagcgtaaggtaggccaatgggcagattagcaaagatggcaaaccagcggtttcgggagacacaacttgtgccaaaggcagtattgtgcgagatgtcatggatggccagtgtcagcgagtggttgatgcagccaccaaaggcataggcccaaaatagcagccatcgccaagagagtccccgtactaaccagcaggccagcacctgaaccagtaccattcccgacacagtccacttgatgtgagggtctggccgcatcagggccttgatggctgggtacttggctacaaggaagacaagggtgatgagtgattcagcatttattgaaccctcattctcctgtcaactcccatcttcagcccccagaagtccctgaaagtatacagcagcacagcccataccctcatgggtcttggagaggcatgcagtcgctctagtttgtgtctgggaagagttgcagcctggactgtggagtgcaaagaccctgcctctgaccaccttccagacgaggctagggagacttcccaggtcgggggaatttgccactagctgaaataaagtacaggtgctaccacaggtcacatgaaaaccaaaggagccacagagacaggaggctcatggcccccagtgttcctgcaaacacacctaagtcgtgtgggactaggaacttggacatggccagagaggggtgatgtggtcacccccaaacttctcaggcacttgggttggacaggcatggcttgggagagagcccctaaatgaataagcactgcagagaagctaagaaacgtcagctgtccacacagcagtgagtatccatccttgtatagtttgtgcctttttgtattttgtattctagaaaaggagcaaacggcgcatgcggaagttagccaagcctgggaaggaccaaaaaggggaaaaaaaaaatagaacggtaacacgtttagatttttggtacctgaagactaagagtggggcaagatgaaaccactggggctgtcctacaggaaggccaatcagctgcatccatgaacagagggccatcccaaacccagaatgatggatcgatacattccaagatagatagaccagatggagccaggtctgctctgtcctctggctccctggacaagaacaggcatcccactgccctgcagatggaaggtcagccaggcaggaacagcactgatgcgcaatgcaccgatacgcagcagctcccacaccctgtgagcagtcagtggcctcgacttgccctgcccaggaatggcctgtggagagtatctcccaggaccatagcaaggactatggtgttcacaggaactggcagggccatgtgaactgcaatgatggctgtataacatgtgactgtcactaatgcctccggcctgcactcctacaagggacaggggagcagtccagctgcctagtgtacacaatgccttggactaatccccagctctgaggagcagagtgtgctgacacacacctgtaatcccagcatgtgggggtgggggtggaaggatcagaagtctgagatatttcttggttacatagtgagtttgaggcagcctgagctgcatgagattgtgtgtgtgtgtgtgtgtgtgtgtgtgtgtgtgtgtgtgtgtgaataaataagcaagcaaatagaagagatagatagatagatagatagatagatagatagatagatagatagatagataaacagataaactgtatatatttttatcacaagaaaaatagaaaatagtctggccaggcagtggcggcacactcctttaaaccagcacttgggaggcagacgcaggatcactgagttcgaggccagcctggtctacagagtgagtttcaggacagccagggctacacagggaaaccctttctccaaaaacaaaacaagcttgcagaaacctcttatctcccaaacacttcatctgagcaatgggcgggatcctaagacaaagccctattagctgcctaagagatttcagggccaagcggaggcagctgccagagtctgcttggagaggctcctgatggcacagggtgatgggcatgggcatgaactagcagtttccttttggactttgcccacagttgcttaatggccctcaggtatctgaagagcctaggctctaggaaaccaagctgcccccaagctgactacattgcctgttttcatatggcaccagtcatgagcagaacagtacttccccctaaggtcctcatgtgctgaccccacagcctgtggccaccttaggtgaaaggtcaagaaaaagagacgtatgcatcattaaagtcatcacaagatcccccaggcatgcaagagcaaaactgggggccactgggtcaaatggagcatgaggggtgaggccacctgtcttgggacacagaggaagtcccgtgaagaaggtgggtgactccagaagccagagaccaggggatctgctcctccatggggctttcaggattgctgctctgttgatgagggtttcagcccagtaaggcggggccaggacaataaagtccagggcaaacattactgtgaagtgacagacacccacaactgatgactccattctcagcctcctcctcctcctcccagccttgggacagaggccagccaaactcaacctggcctctgagggccctgctgctcctcaatcctggtaggatggacaagccagcagggtaccactgggcacacgggatggaccacactctgtgagccacactccggccttcactctggggactgatgtacctgctgctacttggggaattggtttggggaacagatgaaggtccaggatcaggacaccaccacggagtgcctcagtattgcaggaaaagggacgctgctcatgggggacacaggaccatgggggaaggcagcagaggacatctgcaggaagtctctgtccccaccaggaaaatcacatgcaaagtgtctgagtctgtgcacgccagcagcttccgggtcccctatagtggcctctgtgtacctgcctcacgccctcagcctccctcaggtggcagccagcctcttccctcctgcccaggaacccactacctctagctaaaggcttccataaggtagcttcccttgcttcccctcggaagggagccaagcattggcacaagagggcagatctagccacacctgtgtcaagtgagcagcctcagtgagcccaggcactggcttagatacaggccagcacatgtggcacacatttaaggacacagcctagtggcagtgacttagctggaggtgttcagaccaaggggtgcttgcttaatgactttgttctcctctgcccagaccactgcaagaagtcctgtgcacttcctcctatcccaaagactcgactgtgcccttgagtcctagctggcccttcttagcctcaagtcctccaccgggcctgccatagaggagacatgtaccacatggaaggaagactgtatatcccctcctcagcctaccctcattcctcaagctgcttcttgcaccccacattactggtaagccctttgcccaacgggcatcccacttaagtcttctcttagtgggcatgggcagtatccagcctctagcctggataccctgtgcatgcctcaagagttctggcctctgctagacaatctgaagcccagccgaacagccatctatgtactctgcagccaagcatcgtcagactcaagctggcacctctctttaggctgctccctcatgctccacttctgatgtgtctgcgctgacagccccaagagctaggaacacatgcaggcagcgtcttccttgagggtgtgtggccactagatcccaggaggcctggctgccccagatttgccacctacaggttagtgcttttgttcttcaggacccaccgcctaaggtggggaccatacccacaagacacgcttaacctgtacctctgaggagcctcagggtttgtttttttttttttccagaaaactttgtcatcagggacattgtcaagagctggacaagaaaccaccagagagggactgccagctgcaggccactctgccactcaccccttcttgtcacatggagatggagatccctccctctctttgggctgctgtatcgtccctccagtgaggccgctcatcacttctatctggaaccccatgctcacccctcccaacctcccatgaaccccgtctgggataggttctcctacttctttcccaggaaggctaattaatgcataggattagtctggctacaggacagcaagtttgcctcctgtgtcacaggagcctccagcagtcaggcctgtctggctccctctaccgaactgcctagtgataaaggtgccacccagcatctgtaggccaaagtgctcaaatgagcgccatcccaccagcccttccccgccacagctgagggtgggacttcagaccagcctgtcctcatccaggcacccaaagccttcctagacggcttcctctcagctccgcaacagactgtgagagtgtctcccactgttttgatctttcccaacccaattctgagccacagacaagcctagctctgccccagcatatgggaggcccttgggagattcggcacagcacaaacaaaccagtggtccaaagagcctcctgagtctcttggctgccttgcctcctcacccgccattgttagacttgcttaagctttatcctggtggtggatacagatccgggtctctgaggatctccagctgatgagacggggatgggtccatcttagacttaggaactcataaggggcacatagtgtgtcctggctaagtcgttgtgagagggccaaatggtgtgctggacacttcaactgaaacttacgcactgaagatgtcaggatagagggggtgggaatggcctcaggccctaaaaagtgtttggggtgatggaagtattctcaaaactgggtcatgatgaagagcattggagtgtgtccttaaaagcaaggatatgcatgacatgttagtataccaccataagactgttaaaaacaaaagagggaacatgacattaagacaaactcagtgcagtgtcccggaattcgtgccatgctaacaaggtttgacagaactcaggcagcccaaacttacatccccacatgttgggttaggaagtagggcctctgctgattaagatggagcccctgtgatgaaatcagtgcccttagacagtagactagagtgctccctcagacagtatatcagagtgctccctcagacagtggttcagtgttctccctcagacagtagatcagagtgtttcctcagacagtagaccagagtgctccctcagacagtagaccagagtgctccctctgacaatagaccagagtgctccctcagacaatagattagagtgctccctcagagagtatatcagagtgctccctcagacagtggttcagtgttatctctcagacagtagaccagagtgctccctcagacagtagaccagaatgctccctcagacagtagaccagagtgctccctcagacagtatatcagagtgcttcctcagacagtggttcagtgttctctctcagacagtagaccagagtgctctctcagacagtagaccagagtgctccctcagacattatatcagagtgctccctcagacagtacaccagagtgctccctcagacagtacaccagagtgctccctcagacaatagaccagagtgcttcctcagtaggttagagtgctccctcacacaatagaccagagttctccctcagacagtggttcagagttcttcctcagacagtagaccagaatgctccctcgcctttcagctgcgtaagaacatgataacaacaaggaagcaaccctagccagagcacatatctggcaccccggctgatcctgatggccttccgctaggggtggcaaaggtgattggagggtctattgcttctggtttctctcaatccccagagctactgagcaccagacacaattgagctctccccagcactgagcgaggacatcaggtacagaattccaactggggacaaaggctgagggtgtggcttcctaaagaagagcaggggaggggaaggtgacagggaaggcagggttggtgaatagggcacctgggcacagaaaccagagtgacgatcttcccaaggtctac

SEQ ID NO: 3177 - DNA, 1939 bp, Mus musculus
tgctgcctcccctgttagctgccgcttgtcagcagctggcggagctggaggctgcagggcccccgtctgcagagagccttttacttcagaatattgggggtgtggaaacctcacctctttttttctgcactttgtagcatctgactgactaaatggttgtcctcggtaccaaaaaggctgccatacaatccaaggaaattgcctctgactaggtcatgttcgcatttgaagaattcagtgaacagagtatctgccaagcgcgggcctccgtgatggtctacgatgacaccagtaagaagtgggtaccgatcaagcctggccagcagggattcagccggatcaacatctaccacaacactgccagcagcaccttcagagtggtcggggtcaagctacaggaccagcaggttgtgatcaattattcaattgttaaagggctgaagtacaatcaggcaacacccaccttccatcagtggcgagatgcccgtcaggtctatggcttaaactttgcaagtaaggaagaagcaaccacattctccaatgccatgctctttgccctgaacatcatgaattcccaagaaggaggcccctccacacagcgtcaggtgcagaatggcccctctcctgaggagatggacatccagagaagacaagtaatggagcagcagcaccgccaggagtctctggagaggagaatctcggccacaggcagcaccactctctcctgtagtggacctccacccccgcctccacccccagttccacctccacccacagggtctactcccccacccccacccccactgccagctggaggagcccaggggaccaaccatgatgagagctctgcatcaggactggctgctgctctggcgggagccaagctaaggagggtgcagcggccagaagatgcatctggaggctccagtcctagtgggacttcaaagtccgatgccaaccgggcaagcagtgggggaggtggaggaggcctcatggaagaaatgaacaagctgctggctaagaggagaaaggcagcctcccagacagacaagcccgctgacagaaaggaagatgagagccaaacggaagaccctagcacctccccatccccaggtacccgagccaccagccagccacctaattcctcagaggctggcagaaaaccctgggaacggagcaactcggtggagaaacctgtgtcctcgttgctgtccagggtgaagcctgctgggagtgtgaatgacgtgggcctggatgccttagatttggaccggatgaaacaggagatcctggaggaggtggttcgggagctgcacaaggtgaaggaggagatcattgatggtgagtggacctcagccagggtgcgctcactgccctcccagcaccccactcgccccagtgagcagccctggaaacaggtgcagaaaaacaaagtgctttaccaagactgcccatcaggcaggagctaagtgggatcagcaccacgtaagatggcaccagtcctggaggattgcgaggagccgtgctggccccagcgagcatcgagcctgcagaagctgggatgtacttaagtctcaacctgtgatacaatcttaaaatgaggaaacaaacttcaactcctggattttttagtgtatctgacacagaacaccgggtctattcttttttttgtattttatatttgcttatttaagtgtacgttcctttggtttatagagaacacccccaaatcacctgctttattagatggcttccaagttttctcctatgtgacactgttggtgcctcagctgacagggagcagctgggtgcagtgtggcctttccatgccacagagctgtcagaatgcagcacagctccagcagccacggtgttgcagtctgtctgtccacgcagtgcgcgttgtgtccacacaataataaactgttcactgtccaaa

SEQ ID NO: 3178 - protein, 409 aa, Mus musculus
MFAFEEFSEQSICQARASVMVYDDTSKKWVPIKPGQQGFSRINIYHNTASSTFRVVGVKLQDQQVVINYSIVKGLKYNQATPTFHQWRDARQVYQFASKEEATTFSNAMLFALNIMNSQEGGPSTQRQVQNGPSPEEMDIQRRQVMEQQHRQESLERRISATGSTTLSCSGPPPPPPPPVPPPPTGSTPPPPPPLPAGGAQGTNHDESSASGLAAAGAKLRRVQRPEDASGGSSPSGTSKSDANRASSGGGGGGLMEEMNKLLAKRRKAASQTDKPADRKEDESQTEDPSTSPSPGTRATSQPPNSSEAGRKPWERSNSVEKPVSSLLSRVKPAGSVNDVGLDALDLDRMKQEIEVVRELHKVKEEIIDGEWTSARVRSLPSQHPWSEQPWKQVQKNKVLYQDCPSGRS

SEQ ID NO: 3179 - DNA, 967 bp, Mus musculus
tcagattcagagcacaggactctcctcagggttcccgtgcagacttcattcagtcatggtcccgggtgaacagagtatctgccaagcgcgggcctccgtgatggtctacgatgacaccagtaagaagtgggtaccgatcaagcctggccagcagggattcagccggatcaacatctaccacaacactgccagcagcaccttcagagtggtcggggtcaagctacaggaccagcaggttgtgatcaattattcaattgttaaagggctgaagtacaatcaggcaacacccaccttccatcagtggcgagatgcccgtcaggtctatggcttaaactttgcaagtaaggaagaagcaaccacattctccaatgccatgctctttgccctgaacatcatgaattcccaagaaggaggcccctccacacagcgtcaggtgcagaatggcccctctcctgaggagatggacatccagagaagacaagtaatggagcagcagcaccgccaggagtctctggagaggagaatctcggccacagggcccattctcccccctgggcatccctcatcggcagccagcaccactctctcctgtagtggacctccacccccgagaaaggcagcctcccagacagacaagcccgctgacagaaaggaagatgagagccaaacggaagaccctagcacctccccatccccaggtacccgagccaccagccagccacctaattcctcagaggctggcagaaaaccctgggaacggagcaactcggtggagaaacctgtgtcctcgttgctgtccagggtgaagcctgctgggagtgtgaatgacgtgggcctggatgccttagatttggaccggatgaaacaggagatcctggaggaggtggttcgggagctgcacaaggtgaaggaggagatcattgatgccatcaggcaggagctaagtgggatcagcaccacgtaagat

SEQ ID NO: 3180 - protein, 298 aa, Mus musculus
MVPGEQSICQARASVMVYDDTSKKWVPIKPGQQGFSRINIYHNTASSTFRVVGVKLQDQQVVINYSIVKGLKYNQATPTFHQWRDARQVYQFASKEEATTFSNAMLFALNIMNSQEGGPSTQRQVQNGPSPEEMDIQRRQVMEQQHRQESLERRISATGPILPPGHPSSAASTTLSCSGPPPPRKAASQTDKPADRKEDESQTEDPSTSPSPGTRATSQPPNSSEAGRKPWERSNSVEKPVSSLLSRVKPAGSVNDVGLDALDLDRMKQEIEVVRELHKVKEEIIDAIRQELSGISTT

SEQ ID NO: 3181 - DNA, 1601 bp, Mus musculus
tcagattcagagcacaggactctcctcagggttcccgtgcagacttcattcagtcatggtcccgggtgaacagagtatctgccaagcgcgggcctccgtgatggtctacgatgacaccagtaagaagtgggtaccgatcaagcctggccagcagggattcagccggatcaacatctaccacaacactgccagcagcaccttcagagtggtcggggtcaagctacaggaccagcaggttgtgatcaattattcaattgttaaagggctgaagtacaatcaggcaacacccaccttccatcagtggcgagatgcccgtcaggtctatggcttaaactttgcaagtaaggaagaagcaaccacattctccaatgccatgctctttgccctgaacatcatgaattcccaagaaggaggcccctccacacagcgtcaggtgcagaatggcccctctcctgaggagatggacatccagagaagacaagtaatggagcagcagcaccgccaggagtctctggagaggagaatctcggccacagggcccattctcccccctgggcatccctcatcggcagccagcaccactctctcctgtagtggacctccacccccgcctccacccccagttccacctccacccacagggtctactcccccacccccacccccactgccagctggaggagcccaggggaccaaccatgatgagagctctgcatcaggactggctgctgctctggcgggagccaagctaaggagggtgcagcggccagaagatgcatctggaggctccagtcctagtgggacttcaaagtccgatgccaaccgggcaagcagtgggggaggtggaggaggcctcatggaagaaatgaacaagctgctggctaagaggagaaaggcagcctcccagacagacaagcccgctgacagaaaggaagatgagagccaaacggaagaccctagcacctccccatccccaggtacccgagccaccagccagccacctaattcctcagaggctggcagaaaaccctgggaacggagcaactcggtggagaaacctgtgtcctcgttgctgtccagggtgaagcctgctgggagtgtgaatgacgtgggcctggatgccttagatttggaccggatgaaacaggagatcctggaggaggtggttcgggagctgcacaaggtgaaggaggagatcattgatgccatcaggcaggagctaagtgggatcagcaccacgtaagatggcaccagtcctggaggattgcgaggagccgtgctggccccagcgagcatcgagcctgcagaagctgggatgtacttaagtctcaacctgtgatacaatcttaaaatgaggaaacaaacttcaactcctggattttttagtgtatctgacacagaacaccgggtctattcttttttttgtattttatatttgcttatttaagtgtacgttcctttggtttatagagaacacccccaaatcacctgctttattagatggcttccaagttttctcctatgtgacactgttggtgcctcagctgacagggagcagctgggtgcagtgtggcctttccatgccacagagctgtcagaat

SEQ ID NO: 3182 - protein, 389 aa, Mus musculus
MVPGEQSICQARASVMVYDDTSKKWVPIKPGQQGFSRINIYHNTASSTFRVVGVKLQDQQVVINYSIVKGLKYNQATPTFHQWRDARQVYQFASKEEATTFSNAMLFALNIMNSQEGGPSTQRQVQNGPSPEEMDIQRRQVMEQQHRQESLERRISATGPILPPGHPSSAASTTLSCSGPPPPPPPPVPPPPTGSTPPPPPPLPAGGAQGTNHDESSASGLAAAGAKLRRVQRPEDASGGSSPSGTSKSDANRASSGGGGGGLMEEMNKLLAKRRKAASQTDKPADRKEDESQTEDPSTSPSPGTRATSQPPNSSEAGRKPWERSNSVEKPVSSLLSRVKPAGSVNDVGLDALDLDRMKQEIEVVRELHKVKEEIIDAIRQELSGISTT

SEQ ID NO: 3183 - DNA, 1597 bp, Mus musculus
cagagggtttgtggtcttcagattcagagcacaggactctcctcagggttcccgtgcagacttcattcagtcatggtcccgggtgaacagagtatctgccaagcgcgggcctccgtgatggtctacgatgacaccagtaagaagtgggtaccgatcaagcctggccagcagggattcagccggatcaacatctaccacaacactgccagcagcaccttcagagtggtcggggtcaagctacaggaccagcaggttaaagggctgaagtacaatcaggcaacacccaccttccatcagtggcgagatgcccgtcaggtctatggcttaaactttgcaagtaaggaagaagcaaccacattctccaatgccatgctctttgccctgaacatcatgaattcccaagaaggaggcccctccacacagcgtcaggtgcagaatggcccctctcctgaggagatggacatccagagaagacaagtaatggagcagcagcaccggcccattctcccccctgggcatccctcatcggcagccactggaggagcccaggggaccaaccatgatgagagctctgcatcaggactggctgctgctctggcgggagccaagctaaggagggtgcagcggccagaagatgcatctggaggctccagtcctagtgggacttcaaagtccgatgccaaccgggcaagcagtgggggaggtggaggaggcctcatggaagaaatgaacaagctgctggctaagaggagaaaggcagcctcccagacagacaagcccgctgacagaaaggaagatgagagccaaacggaagaccctagcacctccccatccccaggtacccgagccaccagccagccacctaattcctcagaggctggcagaaaaccctgggaacggagcaactcggtggagaaacctgtgtcctcgttgctgtccagaaccccgtctgtggcaaagagccccgaagctaagagcccccttcagtcgcagcctcactctagggtgaagcctgctgggagtgtgaatgacgtgggcctggatgccttagatttggaccggatgaaacaggagatcctggaggaggtggttcgggagctgcacaaggtgaaggaggagatcattgatgccatcaggcaggagctaagtgggatcagcaccacgtaagatggcaccagtcctggaggattgcgaggagccgtgctggccccagcgagcatcgagcctgcagaagctgggatgtacttaagtctcaacctgtgatacaatcttaaaatgaggaaacaaacttcaactcctggattttttagtgtatctgacacagaacaccgggtctattcttttttttgtattttatatttgcttatttaagtgtacgttcctttggtttatagagaacacccccaaatcacctgctttattagatggcttccaagttttctcctatgtgacactgttggtgcctcagctgacagggagcagctgggtgcagtgtggcctttccatgccacagagctgtcagaatgcagcacagctccagcagccacggtgttgcagtctgtctgtccacgcagtgcgcgttgtgtccacacaataa

SEQ ID NO: 3184 - protein, 358 aa, Mus musculus
MVPGEQSICQARASVMVYDDTSKKWVPIKPGQQGFSRINIYHNTASSTFRVVGVKLQDQQVKGLKYNQATPTFHQWRDARQVYQFASKEEATTFSNAMLFALNIMNSQEGGPSTQRQVQNGPSPEEMDIQRRQVMEQQHRPILPPGHPSSAATGGAQGTNHDESSASGLAAAGAKLRRVQRPEDASGGSSPSGTSKSDANRASSGGGGGGLMEEMNKLLAKRRKAASQTDKPADRKEDESQTEDPSTSPSPGTRATSQPPNSSEAGRKPWERSNSVEKPVSSLLSRTPSVAKSPEAKSPLQSQPHSRVKPAGSVNDVGLDALDLDRMKQEIEVVRELHKVKEEIIDAIRQELSGISTT

SEQ ID NO: 3185 - DNA, 192578 bp, Homo sapiens
ctcactgcaacctccacctcccaggttcaagtgattctcccacctcagcttcccgagcagctgggactacaagctcgcaccaccacgcctggttaatttttgtatttttagtagagacggagtttcaccatgttggccgggctggtcttgaactcctgacctcaagtgatccgccggcctcggcctcccaaagtgctgggagtacagttgtgagccaccgcgcctggcctttgctgactttttaattgggctctttgtcttttatttttgagttctaagagtgcattatatattccggatacaaacctctttgctatactttgaatgtttgtttccccaaacttcatgttgaaatttgactcctagcgttggaggtgggctcggtgggaggtatttgggtcgtgggttgggaatccccatgaatacgttaatgccctccctaggggaggaggactgagttggttcctgctccatcagttccagagagagcccgttgtcaaaaggagcctggcccctccccctctctcttgctccctctctcgccctgtgatctttgcacctgtgggctcctttcaccttccaccatgaatgcaagcagcctgaggctctcaccaggtccccagtcttccagccagcagagtcgtgagccacatttatccagcctcaggtattcctttatagcaacagtaaacagacaaaaccagatcttatcagatatatgatatttgcaaatattttctctcattctgtgggttgtcttttcactttctagatggtatcatttgcagcaaaagtgtttaatactaatgtggtccaatttatttattttttctttggtcacttctgcttttggtgtcatatctaaaaagcctccgccaaactcaaggttatgaagattgcatgtatgttttcttctaagagttttatagttttagctcttatatgaaggtctgtgatccattttgagataaagtttatgaatgatgtaaataaggtttcaactttagtcttttgcatgtgggtatctagttgtttcaacaccatttattaaagcctgttctttaacttggcgcccctgttgataatcaattgactgtaaagttaagggtttatttctcaactctctatcctatttttttttctttgagatggagtcttgctctgtggcccaggctagagtgcagtggcgtgatcttgactcactgcaacctccgcctcctgggttcaagcgattctcccgccctcagtctcccgaatagctgggactacaggcgcatgccaccacacccggctaattttttgtatttttggtagagatggggtttcaccatgttggccaggctggtctcgaactcctgacctcaggtgatccacctgcctcagcctcccaaagtgctgggattacaggtgtgagccaccactccctgcctggactgtctattttattccatcaatgtatatacctgtacttattctttttcaagactcttctggctattctatggtcccttgcatttccagatgaattttaggatcagctttctaatttctgcacaaaataaaagtggaagcagctgggattttgacaggaattgcatcgaatctgtaggtcaatttgggctctcttgccattttaataatattagctctttcaacccataaatggatatctttccgtttataggttttctttaatttctttcggagtcgtttcatagttttcagtgtacaagtcttacactttttttgttaaattcattcataagtattttattgttttgatgtcatgtaaatagaattgttttcttaacttcattttcagattcttcatagcaagtctatcgaaatacaattgatgtttatatgtttatcttatatgcttggaccttgcagaacttgtttattagttctgatagtttttgagtgggttccttaggaatttctataggtaagataatgtcatctgaaaataaaaatggttttacctgtttttgtcactaaagttctcttggaacacagtgacatccactcacatatggtctatggctgtcttcaagtcaaaggccaagggaagtagttgtgttcccggaagcaagtcaggtccagctgcctcttcttgagtcccaataatgagaagcagacaaactagcgaagaagggaattggccaggtgcggtggctcatgcctgtaatcccagcactttgggaggccgaggcgggcggatcaccaggtcaggagatcgagaccatcctggctaacatggtgaaaccgcgtctctactaaaaatacaaaaaaaaaaaaaaaaaaaaaaaaaaaattagcctagcgtggtggcgggtgcctgtagtcccagctacttgggaggctgaggcaggagaatggcgtgaactctggaggcggagcttgcagcgagcagagattgcaccactgcactccagcctgggcgacagagtgagactccgtcccaaaaaaaaaaaaaaaaagggaatttattgctgtaaccggatacaggcagaaggccagagataattccaccagaccaactcaaagtgttagaattgcttatacaggttggagttatgtgcctacgtgcagcacaacattcgcctaagtctattggtaactaattttgtttcaactagaaggtcagaggcaaaaaaaagcttgtgggagacaggcccttgggggtggaggtctttgatttcataagaacctgagaaagatttttctaagatatgtgtaacacaccaacttactgtgacctgggaaaggctgctgaggatgtcttcaacaaaggatatggctttggcatggggaagatagacctgaaaaccaagtcctgtagtgcagtggaattttctacttctggtcatgcttacactgatacagggaaagcatcaggcaacctagaacccgaatgtaaggtctgtaactatggacttaccttcactcaaaaacggaacacagacaatactcttgggacagaaatctctttggagaataagttggctaaagggttgaaactgagtcttgataccatattggtaccaaacacaggaaagaagagtggggaattgaaggcctcctataaatgggattgttttagtgttggcagtaatgttgatctagatttttccggaccaaccatctatggctgggctgtgttggtctttgaagggtggcttgccggctatcagatgagttttgacacagccaaatccaaattgtcacagaataatttcgccctgggttacgaggctgcagacttccagctgcacacacatgtgaccgatggcactgaatttggaggttctatctaccagaaggttaatgggattgaaatgtcaataaaccttgcttggacggctggagtaacaacacccattttggcattgctactaagtacaagctggattgtagaacttctctctctgctaaagtaaataatgccagcctgattggactgggttatactcagacccttcgacccggagtcaaattgaccctttatcagctttaatcgatggaaacaacttcagtgcaggaggtcacaaggttggcttggcgtttgaactgcaagcttaatgtggtttgaggaaagcatcagatttgtccctggaagtgaagagaaatgaacccaccatgttttggccctacaatccttctgtgaaatttcaaaagtgtgaactttttactcttccaaaaaattgtaatcctccccacactgaagtctaggggttgtgagtccctcctgaggggaggcgctggaaagcatgcctggaagctgtcctgtttgtgccacgtttcggttcagttctgcagtgttattaaatgtgttcctcggcgacagtgtggtgtcatgttagaggagacgatctgaacctccagtttgtacctcgtgtcctgcatgttcacaccatttttttcatgactctgtaatatattggtctctgtgctattgtggaatctttgattttgcatcagagtaaaataaaataaacccatcacatttggaacataaaaaaaaaaaaacaagctaagtctgattaagctgtgtgggccccagtaccttcaaggcctgtctcctgtggtaccagagtgattatttctatcttatctcctttacagcttggtctggagtgctgccttagactctctgatgaatctattcaaacagctgcctctgttaccttgactcgtctcagattttgtcgacccgaggcaggtcctggcactaggaatgttagattctattattttgacttgctccaggttagggagaagcccatgcaaggcttctactgaccgtatgctttatttgtagctttgatgtctgggcaccgattgccctaggtttaactatttgctcagtgttaaggcagcgctgtggaaatctgtgtaactggggtgctgtgcaggcctgtctgtcgactgtcatacaggcccgtctgtgtgattgtcagggagaattggcctgccacagttgtgacagaccacatggctttgaaaaagccaaaactatttaccagctggtcctttgcagaaagtgtactgacccttgttctgcaggagtgtcttttgtttttcactgcctctaattaatttcttaattttgaaataatgtattttctattctcaagatttttttgtttgttttccaattgctcttaggcaagatcttcttgactctcctcatcacttctctacgattccctcctttagacatgccacattctgactgcgcagcctggcgggaagaccgtgcctccctgggtggggaggctgcagcctttaaacttcccaacaccccgacccctgacacgtctgctcgcattcggatgcccgggcctcccggcctccttgcgaatgaagtgccggcggctcccacaaaggcctggctgccacagtccccacggtaattgcgagacagcaggcaggagaagtgagcgggaagtttcttccccaaagctgatggtgaacgggcccccaagctgggacccgatgactagctgggagtgaggagagattttggctttcctaggtgtgagctggatggggcttcccttcccagtggcctcagggctcctgggaaggggcacgggctccagggggacccttaggcctctctaggatggctggctggttgtcccaggcatgtacttggcttagttttcttcttcaattaagtggagacattaagttcccataaagtgggaacactcagacttggctgcagaacagcaggcctgctcccgcccagccctgtgacacagccaggtgggagcaggtccctggagaaactccagccagcctgcccactgagggggagcctcgggaagttcacaaggtttgcagcagggaggagcctggcccctccccttcctgcgtggaacccgggattccgactgccaggccgggcgggaagcgctctagcggagggactctggccttgcgagaggaaaaccagaaaattctgtcatggggctctggaacccccatgctcacccgctcccgccctggggagtatacttctgctgtcaataaatctctgcttttattgcttcattctttccttgctttgtttgtgtgttttgtccagttctttgttcaagatgcgaagaacctggacaccctccaccggtaacactaggtcctcctttctccttgcaaacagtggcactaagaagttgccctccacaagacaggtagcaaagattttcccccagccccgtctggccacgcttcttattgatgggtccagatctctaagtcaccccagcagaaggctggagtgctccccggtatgactatagggccctcatcccagagtcacccctcctgccttcaaagccagtaaaacatgatcttagggaaatcacttttgagtgggggagcccgagagaggtgaaattaaaataagctccaggccgggcacggtggcgcacacctgtaatcgcagcactgtgggaggccaaggtgggtggatcacctgaggtcaggagttcaagaccagcctggccaacatggcgaacccccatctctgctaaaaataaaaaaattaagctgagtgggcatggtggcgggaggctgaggcaccagaattgctagaaccaaaaaaaaaaaagctccagctttgacccacaggccatcttcaaggtgtggaagccaaaatggaccagaagtaatttctatttcctgccagatagaacacaagcaggagccgtagttgccaaaaatgcccgcgcacacaggctagtggtctctgaccctcccagggcactgcttgggttggaatggcggcgctcacgcaggattccttcaattctgcactgtcacaagcccacagggctggagaggctggcagcacaaagaggaatgagactcgcttgctggtctcatgaagttcacagcctagttggggagcctgcaagtaagaagacaatcccgatgcaggagggcaggcgtgtgaccccgaaacagtgtagagaaggagcctgcagcctgtggtgggggagggtggtgctgagcggtccaggagagacctgacacatagcaggattgaagatgatttgccaggcaggctgaggcagtgagcagggcaggagaggaggcagacacgtgccgaggagcgcaaggcacattaaacgaatggatgaatgaaggaaaactagccatgctgtgtttaaggaaaacaactgctggtaataactgagttgggcaatgaaattaatggtgtgaatgaaaaaggggtacagggtcacaggtggtcccccaaacccctgagacatctgtggttgtctaagcgtgctttactttggattctggcatgcatttgtaactcacttatgctggttaatgtgaaccagacatggtctcattggtgaatcatcgaaagcaactgtgtttctttccattatttgtggtgagtttcgttttggcaaacactaagcaatggagaagatggtccatggagctggctcctcagcagtgaccccagggctggaaaaacttcaagaactgggcaggcagtccaaggccttggagtctgcagaaatacatgctcatttggctcttattccagtcacctgtgtgacctcctggggcctcagtttcatcaccctctggacaagtaggttggatgagatgccctttgaagacttgctagctctgttatctgtgactctgtgactatcctgaacccaacaaacagccaaaatcatctttcctgcctcccttacaaatggaaattccagcccaggagcgcttggaggcatgggtcgtcagcctggctgagtgtcctgcacccacacacatcagatgtcatgaaatcactgactctggcaaggaaactttccaaatcctaggactggtgacctccagaaataagtcattcgggggagccacatgtccaaatgttaattttctttttatcagaagaatggaaaacatgaattcatgtacttttaaggaataaagcctttgttcagaaaatgcaaaacgtgccaaatagactgtggtttcaaattatgtttcgttaaggaagaggggaggggaggcgagggggagggtactgaagaagggcagaaaaggcctttctcgggatctactttgtgtggacatcggcatctcatctgagcctcagcagcacctgccagatgggctttaggattcccacctgccagaggaggaatggaggtcagagaggtgtgagctggaggattaacacaaggagcctctgactccccaagcatcccagggtctgtcagacaaagaccaatgcccactcaggtggaagcagggcacaggataggatgtgagtggtcccaatctgtcgtctctcagctcctcctgcagctcatgaagccctctgatgaacaaacatcagctgcaagaaacaacctctccaggagcaagacggtaacaacttgtcagacttcagggcagcagggaaaatacctgatctggagatcagagtgggccacatgctgaaagagcatcaataaaccaggctgcaaacaagcaggcctgtatcccaaggtctcagcacaggactttgataggcagtgaccaggggttaaccttgcctttccatagcacagctggaatgtccccaggtgacctgaggcttgtgcattttagtaaattttaggatgcaacaagactctcctgtagcaaagagaccactcttgaacttgtgaagagagggacaaatgaggttatgagagggtaccaccctcaggggctgctaccagggctgtaggagatcatggtaccctttcaggtttgacaactctgggcttaaacaaatacaggaaggaaagtggaggtgctacaaccaatcgctagggaactctaaatacctgtacacggtgagggaggtacaaggagacagggagagagagaagcacatagagacccaaactgcagcccatgacactgatgttcaaccccagcaaactagaacgcatgggcactgggattccgagtcagaaaaacgctgcttgagacttggctccaccatttactatatcttggacaaaactgcttaacacacacagcctctcctcaatcctggacaggaggaaaatagcgacccttcattgccctcctaactgccagacgctgacaaacgccttaaatgctcttgttcagaccgtttttcaaaaggtagctattaacgttctgtgacacggggaagggaggcaatagtgcccatactggtaatgcatgaggaactttgtcttcttttttttttttttttgagacagagtctcactctgtctcccaggctggaatgcaagatctcggctcgctgcaacccctgcctcctgggttcaagcgattctccttctgcagcctcccaagtagctgggattaaaagtgcgtgccaccacgccgggctaactttttgtatttagtaaagacagggtttcaccatgttggtcaggctggtctcgaacttctgacctcaggtgatccacccgcctcagcctcccaaagtgctgggattacaggcgtgaggcactacgccgggccggaactgtgtcttcttacacacggggagtgagaccctggaggatctggggtttccagccaccagtgagattcactaacctttaggaaagatggggatttaaaaaccagagacaacctggacgaactacttgacgctgtgtacggtaaatgtgatttttcacaggctgtggttctggggacccgtgtgggctcttgttgagctgggggagatacttcgaatactgatatcgccccaaagctgcaactctccggccccgccacggctccttatgtacaaagagagggaatcagtcgccggtgacctcgacggccctcggatcagggatgccccgagtccgagcgggcagggtgctcagcagggccaggtgatgggaatcatggggccatcgagcacggaccctggctcccccggtggcctctgtgagctctggggtcaggcggggactggaggagcgtccgcgccgggagggagcgcaccgcgccacgtgcccgcccggcgccccgcccccaccccggccacgcccctcgcgcttccctcaaagccccgcccctcagccccgccactctcgtccgccccgcccctcgcagcctcaagctcagcgctcccggaggcgcggacggtggggccccgcgccttttgtgtcgggctttgaccgccgcgcgcgctcattcacctcagcggccgcgggcggaggggcgcacgcgcgcgcagtcccctcggagggcggtggggcgaacagcaacgcgcgtaccctagctcttggctgctgtgctgagactagcccgcgcgcccgcgcgcctctccctcgaggactcggagccgcccgcgcactcgccaggggccgccgccccgagtctcaggcggacgcgcacgcgttcccgccgcccggaccccagccagctcgccccccgcccccccatcccccggcggcggcccccaggcacgcgccggggcacacgccggcccgggcagcgcccgccaagatggcaggggccggggcccagctgtcagtcgccgccgccgcggcccttccccgcagctagcggccccgacgcccacccggagaagatgagcccccgctgccccccgcagcccagtcagacgcggagccgccgcgcccggggccggctcccccgctagcgcccgcgtcccgcgccccgccgccgccgccgccgccgccgccgggtcgcccctggcccggcgcgcccgtccccggcagcgacaatgaggtgagtcggggccggcgcctcgtgggaggtggcagcggccagcgtcggaggggctgggctgggggcccgcggtgcccccgagggcgggaggggggctccacgggcgcgggggcttccagagaaccgcgggggctctgcagagattcgggggcattcagagcgcgggaatggcttcgcgagagccgtgggggcgtctggagagccgggagggtctgcagggcttgtggggggcagtgttctgcaaggggcaggcggcgctggctttggctgcttgtggggtcctcttaggctccggggggcctgcggcggcctgggaggcagacccccgcgggcaggtgtggccgtgtcccgaccgcgcgaggaccgaagttggcggaagcccctgtgcggtgccttccagcccggaggaggctggcctgaagcccccaggcgttgccgaagcctccccctgccagcgcccagagccgcgtttgggcttttacaggtgtagtttcccctcgacttggagcccgtcaaccccttcgtctcctaattctcaaccccccttttttttcttcttgcacgccagtaaagtgcaaggcccccaaatgtaccgctcgttgatgtatcacccagctcgggagcctgctgattatcaggccaagaaataaaaccttgcttctgccagaagcccggtgccctctcccagtcgctaaaccctcccttcctctccagatcctgtcgtgacttttttggggtaatcactttttttttttccatttgtaattttgctttctgaacacgtatctcgtaaaaactgtagtttgtaactatagtttcgttttgcctgttttgtattatttatgacaatgaaataatacagtattcttttgtgtctggtgtttttcaagatgttttcgagatccattccgttgtaatcgttatttgttcatttttattggtctatagtattctgttgtaagaatataccacagtgtacgcattctactgttactagacattttagttgtttctagctttgttggctattaataatgctgttatggatattgttgtgtatctcctggtgcattcatttcgattgggtagatatctagtagaatttttaggtcaaaagataagcatatctttagcattagcggtaaacaccaagttgccaaagtggttctacgagctgacattcttaccaaaaaatgtgtgagagttcttgttgcttcacctccttctcaacacttggtattgtcagtcttaaattttaaccattctggtgattatgaaatgatatcccattgtggttttaatctgcagtttcctgttgactgatgaggctgaacatctttttatttttatttggtatagttttctggagtgcctgttcagatatcttgcccacatttctcttgggtttttgtttgtttgttttgagacggagtctcgctctgttgcccaggctggagtgcagtggtgcgatctcggctcactgcaacctctgcctcctgggttcaagcgattctgctgtctcagcttcccgagtagctgggattacaggtacgtaccaccacacctggctgatttttgtatttttagtagagacggggtttcaccatgttggccaggcgggtctcgaactcctgacctcaggtgatcaacccgccttggcctcccaaactgctgggattacaggcatgagccaccgaaaatagtttcctgtaaaatattagaaagcttacatgtgttttcccttttacattaagatatatggttcaccagaaattcatttttgtgtgacataatgtgaaaaaggggttaaattttatttttacttaacaccatttttttcagcaccatttattaaaaagataatcttttccccataactctgttgtaccacctttgtcatcttccagtcttcgctttggagttattttctttctgcctgaagaatactcttcagtattctttagtgcaggtctggcaacaaattcttagtgtttgtcgaaaaacatcattatttattcttcattgttttcttttttgtaagttttattgagatataattcacacagtaaaatgtacccatttaaagcctatggtttagtggtttttagaatattcagttatacaaccattaccacatctaattttagaacttttttccatttgtgaagtgtctttttattagttttatagaactcttggtttgccattgatttcttttagcattttaaaaatttaattcactttatttttcttgtataaaaatcctgcattgtataatagccatagctggagcctgggttctctgcagtggagactctggtcagtgaattcctagtttcctaataggtagacttggtgaatatggtctccttccagagcttggggatcagatagctgtaggtctttgagatgacattaacagtggccttggtgaagttgcccagggtggcagtgcagcccctgactgaggtgtggcagtccttaatgccagccatcatcaacagctttttgggcacagagatcaagatgaaaccattgtctctgtgtgtagagatgaggtgtaccagcacagagttgcagtggtctgtcaccttgcaaggaatgccgtggggcttgccagtgttgtctcctgagatgcctctctgcaccgggacagtggagagcttgacaaagatgatgactccttggatggtagtaggtaccgtcttggagcatttaacacccagaccgacatggatattttagtccccaatggcaacaagtgccttgaatctggaccactggccagtgcaagtctccatttttactggcataatcttaaactcattcgtgagggttgcccccaggaaaaagtcgatgatctcagcctccttgatgggcagggagaggagatagagcttcagggacttaatcttcatgtccttgactatgctgcccagtttgatgatggggacctactccttggccttggccttggccttggccttgccaccaccagctccgtggccccagccttagccctggatgccactgctgtggcttcccattttggggcctctaggccctcccactgcactggtctcattcgccatttggtgttttcttggagaactcttttagcattttaaagctatttcattatctatgacttagtttctgttgagaagtcacttgtcagtctcttgttcctttgaaagtagtctttttctctggctgtttttaaagttctgtctttggttttcagcaatttttctatactgtccctagtatggatttctttttatttataattagagtttttagggattcttgaatttgtggcttcatgtcttccattggttttggaaatcatcagccataagtacttcagttatttcttctgccccattttctcttacctttccttctagggctacagtgatatatgtgagaccagcagttcacaacttttttggcaccagggactggttttatggaagaaaatttttccttggggggttaggggggtagtttccagataaaactgttccacctcagatcatcagggattagcttctcataaggagtgcacaatctggatcccttgcgtgcacagttcacaatagggttcacgcttctatgagaatctaatacttcagctcatctgacaggaggcagactgcaggcagtaatgctcactcatctgccactcacctcctgctgtgtggcctggttcctgacaggccatggaccgatactagttcatgtccaggggttgaggacccccatgttattccatttcactatatcttctatgtctcttaactgtttctctgcattttacatgtttctctctctcttctttattctggttatctccttctcactgtctgtctctctccatcacccctcctctgctgtatataatctgctattaaaaccacccattgagtttttaatttcagggtttttaaaaattatttttaaatttcttttttgttttttatttttattatttttcagagtctcattcctttgctcaggctagagtgcagtggctcagtcatgactcactacagccttaaactcccaccttagcctcccaagtagctgcagctacaggcacacgcccccatggccagcttttatttatttatttatttatttatttatttatttatttatttaagtgacagggtcttgctgtgttgcccaggctggtctcaaactcttggcctccagtgatactcctgcctcagcctcccaaagtgctaggattacaggcatgagccattgtgcccagctgatttttatatttctatttgtttctgttttatacttccaagctatctgccaaaattatcagtcttgtcttttacctcctttaacatagtatgtgtaattatcttaaagtccatgttcaattatggcaatctgttagttgtttccagtgtctgtttctgttgattttcattcatattgtcttgtctccttatgtgcctagtgttttttttaatgtgtggtaaacatcatatttgcaaaattatttgtaggaataatttgaggcctaagatgatgcttttttcttccagagataattaatatctgctgttataaggcacatgggagcacttacaattggcgttgccttcagtacagtttcagggattgaaatatctctaagctgagctgcagttcttgtgaagacaaacctgttctgttcacttttcctcctaatgttctcttcttcaccagcacctttactctccaccccagcgccaatcttttagcattcccttcagaattgataaacacccttcaggaaaattagcctcaaacactgagctcactttctcaggctctgacttgctttcctcccccgtgcctccaagcaggtatttcttacatttttcccagcgtttctagttctttttagatggaggattgttctgattgttctgattagtccacagttactatcagtaaaagtccctgatttttgcattttcaggaacagtttgagtcaatattcaattctggagattcatgctaccaggttatggaagctgtagagaacagtgacacctattttcttgtgttctgtcctaattgtattagattatctctgccagtttgtgaaatgcttttggaatcaagataactttaagaataagtctttaactcctcttaataaataattaattgaaaaaaatagcagtttagctcaggtcattaaaacaaaagatttggggggcaggtacttttatctcctttccatggttcctttctcctgtcttgatttccttatttatttgataaaaattatgctctaaccagtcctcctgaatagaaatttaatttattttttatttttattttttagatggagtctcactctgttgcctgggctggagcacagtggtgcgatctcagctcactgcaacctccatctcccaggttcaagtgattctcctgcctcagcctcccgagtagctgggattacagacatccgccactatgtgcggctaatacatcgtattttcatccgccactacgcgcggctaatattttgtatttttagtagagacggggtttccctgtgttggccaggctggtctcagactcctgacctcgtgattcgcccacctcggccccccaaagtgctgggattataggcatgagccaccgtgcctggccagaacatttaatttttgagtctacagtagcataagagcattctcagatctcattctttgggatctaaaaaagtcatggatggctgggcacggtggttcatgcctgtaatgtcagcactttgggaggccaaggcaggcagatcacctgaggtcaggagtttgagaccagcctggccagcatggcaaaacccccatctctactaaaaatacaacagttagccaggcgtgctggtgggcgactgtaatcccagctactcaggaggctgaggcaggagaatcacttgaactcggaaggcagaggttacagtaagctgagatcttgccattgtactccatcttgggtgacagagcgagactctgtctcaaaaaaaaaaaaaaaaagtcagcagggtgcggtggctcacgcctgtaatcccagcactttgggaggccgaggcgggtggatcacgaggtcaggagatcgagaccatcctggctaacacggtgaaaccccgtctctactaaaaaaaaatacaaaaaattagccgggcatggtggcgggtgcctgtagtcccagctactccggaggctgaggcaggagaatggcgcgaacccgggaggcggagcttgcagtgagccgagatcgcgccactgcactccagcctgggcgacagagcgagactctgtctcaaaaaaaaaaaaaggcatggatgtagaaataaaagttcttaagtggtttttccagaatgaagagccatttttcttttcttttttttaagtcagtcattttttacacagatttttaaaattgctacagtttaacctggttctccattgcagactgcttatagttgaatacctatacgtgtatatttacctgtacctgaagtacttggctttagtacatggatttaaatgaatccagggggacttttcattacctttgttgtcagttgatttgatttgattatttataagcaatttggtttacctatgataacactttcctttttgttcagtcctaaatttttaaaatgaaagtaacgtattatttctcttgatagatactgtcatgagagtacgtagatatgacctattgctaaaagtctagaatgtaatatccaaactgtgttccttttggagcatctcaggaagccataacgctggagatgcattctaacaagtgagctaaacactcgaggcacatgtccacttattttagcaaaaaagtactattgaatcgacttattcaaataaagaagtctaagtctcagtttttctttattttctagactactgcctgaattcttgtttctctttttctaacagactctatgtattttcatattttcattgagaaatcgttttttgaaggcttactgttgtctggtactggattagatggggtaaggaggtgtaaggaactagacactcccatcccccactctcaccgcccatacacaaataatccccatacctaaaagatttacagaaacttactaaatctttctgcagttgctaaaaaaaaaacaacaacaaaaaaacccacccacatatacacaatatgcaatctatttctgcttatatattcgagtcatttatctattgggaacattctcttctgtgaacattttccctatctgctttttttaaagatttagatacagaagttaaaaaaattttaggtcattaagttttgttcctgatgatttttccatatttctgacatttaagttattgtttttctagaattttaattattaaacttttttttttcagttatatgtgaagttggccctctgtgtctgtcgattctgcatctgtgggttcaaccaaccttggatggaaatattttttttaaaaaaaggatggttgtggctgggtgcggtggctcacgcctgtaatcccagcactttgggaagctgaggtgggcggattacgagatcaggagatccacaccatcctggctaatatggtgaaaccccatctctacgaaaagtacaaaaaattagccgggcgtggtggcaggcgcctgtagtcccagctactcgggaggctgaggcaggagaatggtgcgaacccgggaggcagagcttgcagtgagccaagatcgtgccactgcactccagcctgggcgaacagagcgagactccgtctcaaaaataaataaataaaaataaataaataaataaaggatggttgtgtctatactgaacacgtactgatattttttcttgtcattatcccctaaacaataaagtataacaactatttatatagcatttgcattgtattaggtgttataagtaatctagagatgatttaaggtatatgggaagatatacctgggctatatgcaaatatgactccattttacctaagggatttgaacatctgcaaactttggtatctgagatgggtcctggaaccagtctcctgtggatactgagtatgactgtataacagttttaaaaattcattcttcaaatggtctgaaatatgagatggagacttaaattatatttttctcaaaattgctggtcagatacttgatcatatcagtagtttatgtggtagagataacagcaacattttctgggttggacggccgtgcaggcatctggatcccaacatcccggggtgcatggttgtggctggtaatgcctacatgagtgagaatcacctctaattctcagaaagttacctgcctcccccggggccagccttgtacatgtgaggcatggccagtccagcctgtcaacaggtctggttacgagccaagaaccgcttcatctgggccaagggcactttattgatattggagttctacagaatgcagtgtgattacagaatacagtataaaatacacaggtacaaacagtctccatttctcacccttagcctatactagctatcacagttgggtccaaatatatttctgaacccagtgctgcaaattgcaggtacggggcatttcctaaggtggcttttgtaagggctatagggattccgtgtgtatctttccaggctctcttgttctgtctgcctgtttttaggcctatgccattaccatatttaccttgtgggcagtgattttaatttgagcggcatcattgattaatgttattttgaattttgctggtttggtgattttgtttgtatttaatttataagtttgttttttgcttatctagttatataaacataagacatttaaacttagttttatagttgtgtatataagctgggtgtggtgtcacatgcctgtaatcccagctactcgggaggctgagcagaaggatggcttgaggccaaaagtttgagaccggcggcggtgggcaacatattgagatcctatctcaaaaaaaaaaaaaagtgtaggcatctgctttttaggcttttggctagcacttctgttgattaagaaaaataataggccaggcatggtgactcacacctgtaatcccagcactttgggagtttgaggcagtggattgatcacctgaggtcaggagttggagaccagcttggctaacatggtgaaaccccatctctactaaaaatacaaaaattagccaggcgtggtggcgggcgcctgtaatcccatctacttgggaggctgaggcagaagaattgcttgaacccgggatggggaggttgcaggagccgagatcatgtcattgcactccggcctgggcaacagagtgaaactgtctcaaaaataaaattaaaaaaaagaaaagtaacaattatatatataagctgaatgaatataaattaaatcatattgtttcacatacagatttttcccctttaaagagaatatgtgtactgcccatgtttgaggaaccttgcagtagacttaccctggagatacagtgggtgcacaataaagcagtaaagcaaatattgtaagaaagcaagtcacatgaatttttttgtttccaagtgcatatagaagttatgtttacactataccatagtctgttaagtatgcagtagcactatgtctagaaaatgtacataccttcattagaaaataccttattgcttaaaaatgctagcaaagtgagcatagggtattggaaaaaatgatgtcaatagatttgctcagggcagttgctacaaaccttcaattggtaaaaaacgcaatacctgtgaagctcaataaagtgaagcccaatgaaacgaggtctgtctggataagcttgatgaagggactcttgagttgccacatgaatgtatcgcaagtgctgcagtaagagtggtggtaactcaggggaaagcacttccagctgatgtcggggtgagggtgagaagagtggccggtcccttcatgaaacagttaaggagagtatgaaaacagaatggtatgatataaagaagacaatacagataagcattgatcctgctctttacagataaccacatcaaacctgtggtgtagttcctttatcattcccaggtacaagtgaaacatttttacaaaattgaaagtgtactgtatatttgtattgggcattgtacatttgatatatgtgcacttcccccttactaaatattctttgaaaacagctaaatattctttgaaaacagttaaaatagctgaataatagtctgtcagatggtatactataatttattcgtaatatatattttaatggtatttttgggaccaaagggtataaacattttaaaggctatcaatatatactaccagaatgttaattttaaagaagaagaagataaagttagtgaatagaagtttaatcctagaggtttaacttggaggttctcccaaaaacaagcaccaaaggaaggactttggaaaggaatcaggagagagaagtaaatggggttaagagggagagcggggggaaaaaatactgtactttgaaatggtgtagttctgtctgctcaccaggggagggagccctgttcccagttcctctgtgagcgattcatacgaagatgcattgtctttgtctttagggctgtgtgaaagacatctactcttcagtttgcagttaatgtaggtatgtaaagggacttcttaaaaagaatttgagttagatttaaaatgttttagtttaatttaacccctgtatactgagcagcctgggttttagagtcagacctggattctgccccagaggtactacttatcagctgacttttagcaatttacgtaacctttatgagcctccgtttttctcaagtataaatgaggacagttcactttcttcagagggttttgtgaggatcaaatgagaatacatgagaagttctcagcttatgatattcagtaaaggttagttatctgccctactccaccccaccccagcctcaccaccctgtatttattttctagggtttatcttccatgaggatatgggacagttctggtttcaaatattctgcccttttgtcagatgactatatgacttcatatgtgataaattttggtttagaaactgcagttgctattgatgcatcaccttctaagaaagatccagtgacattctctatgaaagatgaaatagacaaaagaaagataaaacaggagacataatatttggacgtagaggcgataattgtaccagaaaacttaggttaagaaagagttacttcagtcgagcacacttagctgtgaaattcatggaagtcatgacagaaagggaaacatgagccagtgtgtgcctctccttgggtaataaaggagagacatgccattttatagctctaaaggtgtgtttcctatggaacttaaagagacagtggaccttacaagagcttggttttggcagccgcctacacccttctccagtccttttcccatgtatttgtcctgggcctcttctttaaaaggttccagcactctcaaccattctctgggtcctgcctgctgctctgctgcttttgtggagctgtgtttattgcacttatcttctcttctcccttctctctcaaagaattcttaaataagaaaagatctgttgctaaatcatgcaagttgatctcagtctagctgcttccttttcctctttaccttgctaacttcttagccttcaaatcttatttgaaacatcacttcctcagggaggcagcctttgacccttagcctagctgagggccctttcctgttaattacctttgtgatatcccatatttcctcttctgtaactgtttatatgtatgtaattacttaaaatttccctgatctactgaaggctttataaaggcagagattatgcttgttttgatctctgctagaaccccagaaccccaagcactggtacttggcacttggtagatgtttaataaaacattgacactgccacctgtacctaagatggatagttgatcgtggcattcatcccagtttggcatggatccttctaaggacagcatttcaggtggccacccccaaatcgtagaagctagcatccaagcaaaagctattttattatgtgcttaatgacttaatgcattactgaggtgtcagtgatttagtctgttgtgtccttactgctgccataagacatgatttgtttggtgatgtgtggatgggtatttttttctgtgatttctttgtaaggacgttatccactgtaacccttagtatcccagatgtttctcaaacttgaatatgtgtaggaatcactggagggatgtgtatgtatgtatgtgtctttccaaaatggagaccccagccccatccccaaggatgaatgaatgcttttctttcttttttaaattaatagactttgtattttagaacagttttagatttatagaaaaattgagaaggttgtacagagagttcctatacacctcctgcacacatatagtttctcctgttaattaacatcttatattagtatgatacattattactgatatgttattattatcatttgagacagagttttgctctggtcacccaggctggagtgcagtggtgcgatctcggctcactgcaacctccacctcccagtttcaagcgattctcctgtctcagcctcccgagtagctggaatcacaggtgtgcgtcaccacacccggctaatttttttgtatttttagtagagactgagttgcaccatgttggccaggctggtctcgaactcctgacctcaggtgatccacccacctggacctctgaaattgctggtattacaggcataagccactgtgcccagctgacattattattaattaaagtccagcatttattaaagtttctgttgtttttacccggtatcctttttctgttccaggatcccattcaggacatttagtttagtttgtatataacaacgttaagttgttatatctctttaggctcctcttggtgctgatggtttctcagacttaactcatttaattttaatcacatttgcttacatttttgcttgacagatatatatatattgagtacctactatatgcaagatagtggggctagggatagagagctatggagacctacataagcctcaaggagtttatagccaagaagaatagcatggggcatatgagatggcagtgtcagaaaagaggtatgaacgacataatttttatttattattattattacatttgagatgggcctaggggaactggcaggattttgactgggcttatcttctgttttggttcttcacctttgtacttccttgaactggtctttcttccagttggcttttcagatgcttgaagacaatggacttcagtaagtcttgccttttcttggttaaaagtccttggtcttggccaggcgtggtggctcatgcctgtaatctcagcactttgggaggctcaggtgggcggatcacctgaggtcgggagttcgtgaccagcatgaccaacatggagaaaccccgtctctacttaaaatacaagattagctgggtgtggtggtgcatgcctgtaatcccagctacttgggaggctgaggcagaagaatcgcttgaacccaggaggtggaggttgcggtgagccaagattgcgccattgcactctggcctgggcaacaagagcgaagctccatctcagaaagaaaaaaaaaaaaaagtcccttgtcttttagccattcattactaattagtggcccttctgtggaccttcctttcactgagctctggcctgctgaagtcctttagcaatttagatctctaacttcggcttgaatacagaaagatgttcgacctagcacacaaatgaaaccctgaatacaaaatggaaacatactaaaccttggagcctctttgctgatagatcaaaatcaaatgtattggctgggcacgatggctcatgcctgtaatcccagcactttgggaggccaaggcgagcggatcacctgaagtcaggagttcaagaccagcctgaccaacatggctaaaccctgtccctactaaaaatataaaaattagccagacgtggtggcatgtgcctgtagtcccagctactcgggagggtgaggcatgagaatcgcttgaacctgggaggtggaggttgtggtgagctgaaattgcaccaccgtactccagcctgggtgacagagtggactctgtctcaaaaaaaaaaaaaaaaaaaaaatcaaatgtatccactggcactgcttctttctaccagctgagatttctaagaggacagcttcagggtcccgtttatgagcattttctttcctgggaagaaggaaaatgctctcctcaatttgtatcattaaggaaaaatcaaacagtaagcaacagactgaatcagatagtgtcccaattagaggagcagcgctaggaagggaaccagctggtgccttcacaagatcagagtgatatgcttcagagtgtccaaggctatgggtgatgaggcagcatgactgtgaagtgcacatatggtaataattgcacaaatatttattgagttcactgtgcagatttctggactatgaattgaagacatggttttctacacatgtagcctagttccaaggagatagagcataagtacgtgcaattcagcatgtctacaactggacttactacccctacatttatgagcaattgttttttgacaagagtgccagacaattcaatgggggaaaatagccttttcaacaaatactgggacaaagtacccacatacaaaagaatgaaattggaccctacctcacaccatatacaaaattcaacttaaagtagattgtaaacttcagtgggaagactaaaactttagaactcttatgggagaaaatacaagagtaaatctgtgtgaccttatgttagacaatggtttcttagaaatagcaccaaaagcacaaatgaccaataaataaataaattggattttatcaaaattaaaaatgtttctgctgaaaatggtaccgtcaataaagtgacaagacaatcctgataatgggagaaaatatttgcaaatcatatatctgataagagatttatatctagaatatataaagaactcttatattttgctatggtctaaaagtttgtgtgctcccaaaattcatatgttgaaatactaccccccgccaagattatattattaagaggtggggcctttggaatatgattaggtcatgagggttgaactctcatatatgggattagtgtccttataaaagaggttagaggccgggcatggtggctcatgcctgtaatcctagcactttgggaggccaaggcaggtggatcaactgaggtcaggagtttgagaccagcctggccaacatggcaaaaccctgtctctattaaaaatacaaaacttagcctggcatggtggcacacgcctgtaatcccagctacttgggagactgaggaaggagaatcacttgaacccgggaggtggaggttgcagtgagccgagattgcaccactgcactccaacctgtgtgacaggagcgagactctatctcaagtaaacaaacaaacaaacaaataaataaaaggggtttgagggagcttgtttgcccctcctagcatgtgaggatgcagcaagaaggctctatgaggaaaaggccttcatcagataggtaatttgccagtgccttcatcttggacttctcagcttctagaactgtgagaaataaatattgtttataagccacccagtttctggtatttttgttatagcagcttgaatagactaagacatctcaacaatgaaaagacaacccaattttttttttttttttttttttttttgagacggagtttcactcttgctgcccaggctggagtgcaatggcgtgatcttggctcaccactatctctgccccctgagttcaagtgattctcctgcctcagcctcccaagttgctgggattacaggcatgcaccaccacaccctgctaattttgtatttttttagtagagatggggtttctccatgttggtcaggctagtcccaaactcccgacttcaggtgatctgcccacctcgacctcccaaagtgctgggattacaggtgtgagccgccgtgcctggccaagacaacctgattttaaaatgggcaaattatttgaatagatacctttctgaagaagataaacaaatggccaataagcacttgaaaaggtgcttagcatcattagacaagaggaaaggcaaaccaaaaccacaatgaaataccatttcatactcactaggatggtttgaataaaaaagataataacaaatgttggtgaggatgaggataacccttacacattgggaatgtggataaacctcacatattggagccctcgtacattgctggggagtgtaaaatggtgcagctgctttggaaaacggtttgtcagtttttcagaatgttagacatagagttaccctatgacctatcagttccactcgtaggcagatagccaagagaaattagaacatatgtctacacagaacttatacacaaatgatcatagcattattcatgatagcctcaaagtggaaacaacccaaatgttcacgaatcgatgaatggataaacaaaatgtggtatatccatacagtgcaataaaaactaatgaaatactgatataacatggatgaacatcagaaatattatactcaatgacaggtgcagtcacaaaagaccacatattgtatgattccatttacatgaaatgtccagaataggcaaatctatagagacagaatgtagattagtgattgcttgggtgggtggagggtgtggggctgagggtcagtttgagaatggggagtaactgctaatgagtacaagatttctcttgcagataatcccagtatcgcaagattggattatggtaatggttgtacaattctgtgaatatcctaaaaactgttgtatactttaaatgggtgaattttatgaaaaagaaaaaatctgttcctcagtaaatctgttttaaaacaacaacaactgaactcactgtgttccttcccagacttgtcttttttcagaacctttattcccagagagacacactttgtgatccaaaatagaaacctggaggtgtgatggagtgtctcggttccctcctgtcacatccaggtgtcttttatcatttcttcttccttaaaaatctcttctctttgtccccatctccccagggccgtgatacttatttaagtcaggtcttcatcgttattaaaacaccataattatattccacttttgttttctacctcttaaaatgtctcctctgtgctttgttgttagtactcaaatctgagttaatattttcttcttaggtttcttgaggatattcccatatctttataataaagtcataactcctagagagtatgcaaagtcttgcatgagctaacctctttcatgactctccagattaatctcttctgttttcctgttataaggaacccaccctcacatattttttatacatcttttaccttgtatataatattcgtcctgattgtagtgccacatttcaagtgatcaacagttacatggtggctatcatattggacagcacagattatagaccattttcattattgtggaaagttctaatagacagtgctggtctaatacctgacatagcttactgtggcactcagtaaatatctgttaaatgaatgaatgtaatcatagctgttatctgtggcaggcgttcacccagctcctgcttttatacttgtagtagtaagtcagtccgtggattatgaggcaatttattgaattactaaactagccctagttatttcttccttcttcttatactcagctagtatttgcttctctgaaatttctactgttgacccaacttctgcataatccaaaacaacacccaagaattaaaatatggcaatcatttcccccaagtcttctctaggttaaacactttgcttacttaagctttgtataacatggtcagagtcatccatgaaggctggagtcagctttttccaaattcctgttaatgttgatagtttgacctcctccctgaatcacaaatattcttaatgacatctagaatggtgaatattttcagaaggttttcaatttactttgctcagattcatcttctggcatatactagggtatcagcgaagttcagaaaacttgcttaacaataagttatttatttccagtgttcgctcttttttaattttaatttttattgtaaaaacattaaacccactgtcttaaccatttttaagtgtacagttcattagcgttaagtatatgcacattgttgtccagtagatctctagaactttttcatcttgcgaaactgaaactctaaaccccattaaacactaattcccactttccctctcctgacagcccttggcacctacctttcttctttccgtttctatgattttgactactttaaatacttaaactgagtgaaatcatatagcatttgtccctttgtgactggctaatttcacttagcataatgtccttgaggttcatccatgttgtagcatgtgatcagatacccttttttaaaggctgcaaaatattatactctatatatatatagagagagagatgctactttttaaacattcattcattcgtcagtggaatttgggttgcttccactcctggctattgtgaataattctgcagtgagcatgagtatgcagatatctcttcaagatcctactttgcattctttggatacatacccggaaatggttctggatatatatatagagagagagggggtgtgtatgtgtgtgtacccaattgtatatatagctgtatatatataattgacccttgaacaacatgggtttgaactatgctgatctgcttatatgcagatttttttcagtaaatatgttggaaaaattttttggagatttgtgacaatttgaaagaaacttggagatgaactgccaccccctgaggcagcaagatcaacccctccctcctcttcagcctctcaacacaaagacaaggatgaagacatttatgattatccatttccacttagtgaatagtaaatatattttctcttgtgagtttcttaataacattttctttctctagcttattttaatttaacccttttcctgtttagaaaaagtacagctcgctgccagtgctcatttaattttacataaacacactctttgaggctgaagcaaatctgattgattttctatgtgaaaataaaatataaaaactgttcttggagttatttctaaacaaagtaacatcagaatcatctgaatcatcagaatcgtctattttagaaaaatcagattcatcaaatgaatctttggccaacaactgagaatgatgttaacatcacacataggaatgtggtgttttctaggatttggcattttcagcgattgagaattactatattttgtaaatggaaataacactgctaaaaacagaatgctataaatagaatgatgtcttttgtttccaaagttgatatactagagcaatgcgaaaataataataaaagcaaggtatttcgtggcaaagttatctcggggtaaacgcagcaaccacaggcgctgccagcaagtatgcttggggcaaaggggaaaagggttaagaatacagtatatataatacatacatgtaacttataaaagatgtgttaattgactgtttatgttatcagtaaggcttccagtcaacagtaggctattagtagttaagattttggggattcaaagttatacataaatattcagctgtgtggtgggagggtgggagtttgcaccctaacccctgcattgtttgagggtcaactctgtgtgtgtgtgtgtgtgtgtgtgtgtgtgtgtgtccagtgattgctgcatcatatggtaattttatttttaattttagaaaatggctataccatttcacacttccaccaactgtgcacagtggttccagtttctctgcatccttgccagcagttattttctgttcttctgataatgctatcctaatgggtgtgaagtggtatctcattgtggttttgatttgcttttctcttataattactgatgttgaacatcttttcatatgcttcttggttgtgtgtatatcttctttggagaattacctgttcaagtcacttgctcatttattaaatgggtcgtttttttcattgttgagctataggagtcccttatatattctggatattaatcatttaccatatatgtgatttgcaaatattttttcccactttgtaggttgtcttttcactttgttgattgttttcttttgtgcagaagttttaaatatgatttagtctcatttgtctatttttgctgttggtattatattcaggacatcattgtcaaatcaaatgtcttgaaacttttccgccacgttttcttttaggagtgttataggtgttatgtttaggtctttaatccatttttagttaatctttgtgtatggtgtaaggtaaggatctaacctcattctttggcatatgaatattcagttttcctaacactgtttgttgaaaagtctgtcttttcttcattgtgtactctttgtgcccttgttgaagattatttgaccatacatgcaaatggacatcattgccttatttcttctgatcttaggggaaaatctttcatcctttcactattgagtatgatgttaactgtgagcttttcctatctggcttttattatgttgaggtagtttcctctattctgagttttttgagtgttttgttttgttttgttatcatgaaagggtgttgaattttgtcatatgcatttttttgtattaattgagatgattatatggtttttgtccttcatttgttaatgtattgcgttgatttttgtatgttgagccattcttgcattccaggcattggtggtggcgtataatccttttttttttttttttttgagacggagtcttgctctatcacccaggctggagtgcagtggcatgatttcggctcactgcaacctctgcctgccaggttcaagtgattctcctgcctcagcctcctgagtagctgggactacaggcacgtgccaccacgcctggctaatttttttttatttttagtagagacagggtttcacggtgttagccaaaatggtctcaatctcctgacctcgtgatctgcccaccttggcctcccaaagtgctaggattacaggcgtgagccaccgcgcccggtcgtttaatccttttaatgtgttgttgaattcagtttgttagtattttgttaaggactccttcatcggtattcatcagatattggtttgtagttttcttattttgtctttgtctggttttggtatcagattaatgctgacctaatagaatgagtttgggagtgttccctcatcttcaattcttcggaagagtttgaggattgatgttaattcttatttaaatgtttggaaaaattctccagtgaagacatctttctttgttgagaggtttttgattactgcttcaatttctttattaattataagtcttttcagattgtttctttctttcttttttttttttttttttttttttgacttagagttccatccttgttgcccaggctggagtgcaatggcgcagtcttccctcactgcagcctctgcttctgggttcaagcgattcttctgcctcagcctcccaagtagctgggattacaggtgcccgccaccatgcccgactaatttttttgtatttttagtagagacggagtttcaccatgttggccaggctggtctcgagctcctgacctcaggtgatctgcctgcctcagcttcccaaagtgttgggattacaggtgtgagccactgtgcccagcccagatttttttatttcttcagtcttggtaggttgtatatttttaggaatttgtcagtttcttttaagttgtatccagtttggaattacaggtgtgagccactacacccagccttttggcttttttttttttttttttttttttttgtactttcagcctatttgtgtcttaagatctacagtggatctattgtagacagcatatagttggattctggttttctatccattcaaccaatctatgtcttttaattggactttaatccatttacattaaagtaattactgattgggaaggatttactattattttgttaatagtttttctgtatgccttgtagctttttgtctctcatttcttctcttgttgctgcttttgtgttttattgattttttttgtagtgacatattttgattcccttatcatttcccattgtatgtattctatagatattttacttgtgattaccattacaattacataaaacatcttaaagttataacaatctacttcaaactaataacaacttcctttctgttgcgttaaaaactctactcctttacatccctgtccaccccgttatgttattgataatacaaattaccttttttatttcatatccattaacagacttatagttactttttatcttttgtttttaaaattctatactgtttaaaagttatttactcacctacattacaatactataggattctatatttgtctacatatttacctttaccagggagttttgtatattctcatggtttcatgatgctatttaacatcttttcatttcaacttgacgtccctttagcatttctagtaggggaggtttagtgtcagcttttatttatctgaaagaagggaaaaaagtcttcatttctccttccttcattttgaaggacagttttgctgcatgtagtattcttatttgacagttattttttcctttcagcactttgaatatatcatcccactcccttctggcctgcaagattcctacttagaaattatttgataatcttataggagcttccttatacatgaagagtcacctttctcttgctgctttcaggattctctttttgtctgtgacttttggcagtttggttattacgtgtgttagtatgcgtgtctggatttattctatttggagtttttttaaccttgaatttgtgtctccatggctttcctcagagttgagaagttttaggctctctgcctctttgtctttttctttgtattctgagatgtccattatttacatgttatttcactggatggtagtcgataagttctttgaggttctcttcacctttctttattcttttttcgttttatccctctgactcagtaatttcaaatgtcttgactttgagttcggtggttctgtcctctgcctagttaagtgcttttgaacccctctagttaatttttcaattggctcttcatagtttttctttgttgatattctcattttgtttatgcattgttttcctgatttctttagttttctatctgtgttgtcttttagttcattgagcatccttacagtggctattttgaattctttggtaattcatataaatctatttagggttagtttctggagatttaacttgtggttttgattgggccatgtttccctgtttctttgtataccttattatcttttgttgagacttgagtatttgaaaaaacagcacccctcccagtccttacaatctggctttgtacagggagagatcatcaccagtcaactttactagataatctggagaactctcaagccttttcttgggttgagtcttctctatgcatgtaataccctagttgaggtttacctatttgtactcaggattttcacttcccgatttccatctgtggtactgtttcctctctggtgctgtggcaagccttggtactggagttctccctagcgtctgtcagtggtactgcacactctctggtgctacagccagttgcagtgatctttgttttcagtggcttccaacctggtgcccacttctgtcttagattcagttaagaaaccagtccctcaggtagcttcccccctcccccaccaccccatcaaagtgagaacattgaatgtgtgctctacttttatcttttcatccaagaaagaagggatttgggattttttttttttttccaatggtgctatgctgtgctggggagaggctgtggaaagtatatgccatgaacttttctgctggctttcatgaggttcttcttggcatacttggggtacagaaacctcttaactggtttctggatttctcacagaggccatctaacattgttaattcatctccataggggaaggaggatctggtgttttctattccatcatcttcctgtgctctctcttttggagtcaaccttctctgggaactaatttaatccctttatatagttcatgaaatgtgataaaatgtgaactctgagttcaaaagtgcaacttggtaaggggacttcaattctatttctcaattaacataaatagtaaaaataactcatttgttgagtatttttacatgccaggcattgttctaaccagttaacatacattatctcatttaatctttgcaatatctccaagaggtaggtatgattactactctcttttcccccttccccctttttttttgaggcagggtctagctctgtcacccaggctggaggtcagtggcacaatcacagctcactgcagcctcaacctcctgggctcaagtgatcctcttacctcagcctccagagtggctgggactataggcacatgccaccgtgtctggctgatttctgtatttttttagagatgggatctagccatgttgcccaggctggcctcgaactcctgagttcaagcaatccaactgccttggcctcccaaagtgcaggattacagacgtgagccactgcgctcggcctactgccctctttttataggggaagaacctgaggcacggagtgatgaggtgacacccatttggctagaaattgtagactagcaattccaagcttgagagtcacggtactgactggactgctcaaaatgtcataactcagaaattttagatactctgttattacatgatgtagaccttcagtttgtgtcatttcccatctttattacgcattcctttttttaatcacttgcaaaaataattgtttgcctaagtgtaactcctttggcatttcttgtatggctaatgtaaatgcccagcttctcattgagaattccaagctttgaggaagttaagaagctggaagggaagaatgatgtaggtgtttaatgatcacaattcagtttctcttgctcagttgttcttgcctgaagggcagggaggcaaccatcctgtacgtattagtcagtacataggcttagcctttatgtagtccaggtcacaagattaaggtgtcttatgccacagctgggcatgcagtatatgcttagtgtccattgaccaagatgaatgattttgattctgggagaggaaaagattaggacaagaaaggtatggggagggccgtgggagtagagttgttgtgaaatggagataggtctgaagtcagtgttttgaggaatgggtgaagagaggacagacctatcagggttctgtacatccaaaattagggcagaactaggtcaggtgaggcaataaacacagatttctccttttattggttgtttgcgttagaaggaagtgatgttcatgtgtaacttcaaactctgttccctgatgtcaacctctgccctactcttcattaagcagagctgaaattacagatttatttttcctcccttacctctcctttcctaaggggaaatactctatacagttccctttctgttaccaagcatgattagaaatgcaaggtttgactgatgaagtcatttaacctcttggattcatagtctcccatctgtactgtattgcctctcaattcatttgttccttcattcattcaacaactctttatttattcatttatttattttattttttatttttttgagacaaagtcttgctcttttacccgggctggagtgctgtggtgtgatcatggctcactgtagctttcaccacctgggctcaaataattctcccacctcagtctcccaagcagctgggaacacagatctgcgccactatgcctagctaatttttttattatttgtagaaccatggacttactgtgttgcccagtgtagtctcaaacgcggctccagtgatcctcccaccccagcctcccaaagtgctgggattacagacatgagcccctgcactccgcacaacaaaatatttattatatgcatagtggtgttccgggtctaagatctgactctcctcagcttgttctttctccttcccatggatctctaatttgagatattgtcttatcactttaatgctgtcagaatagaggagtatttattttgtacaagcattgttatctgtatgctgggaggagatacatacacacacacatatatatacatgtctgcatctataaaagttactagttttgtaaaaatcatacttgctcattctacaaattttgcaatacagaaaagtacaaaaataaagaataaatcatctgacatgccttggaaattagtagtagttagcattttggctaacatgattccaaattttttttatacaaacatatatacagataaaagcataataataatggaataactgtgtttactagcgtttatgtatggttctaggatgagcaactttatatgcattatatcatttgattctcacaaaaaaccctccaagatacataatgttgccccattttgctcaggaggaaattggtgtttagaataatgaagtaaattgtccaaggtccagtaatggtctctgaatctcaagaccatgctattacactatgtggtgtataatattatgatggtgcataagtgagaatatactgtctatacttttatatttgcttttttatttgatttgtggaaatgtttattatactttataatttataaattatagtaatttataaatttataataattttctataatgtttttattcaacagtagtaatgttcatgcagttagtgaagggctatatttctagtgactggtactctgttgtgtctaccatacattatttgaccagtcccttgccaatggatatttagttttttgctatttgaagtcacataggaataaatatatttgtgcccttttggttttaacttattctgtagtgattaagagtacagattctggagtcaggcagcctgaatttgagtgtgatcagctctgccacttttgaactatgtgatcatgagcaaattactttacctctctgtccctcaggttcctcatttatcaaatgggaaaaataacaagatctctttgccattccctcaggattaaatccgctgacacatataaagaatgtagagcagtgcctgggacataataagtactcaataaacagcactttaacttttagctaaatgtggtggctcctgtctataatcacagctattcagaaggctgaggcaggaggatcacctgaggccaggaattagagaccagcctgagcaacacaagaccctgtctctaacactttttaaaaaattaaaataaaacatgtcagcctttatttatgggtggtggtaggaattcttcctttgaggcgccatggattgcttctgcagagagatgtctgtggacccctggagcttactatgaagagggcatactgtggtggggggtcactctcttcccctgtgaggccatcagcacaaaagtttgtgttttctgggatcaacagatgccctcagggcaaaaggggctctgtgctcatttgtcttttggggaacccctgtttttctctttagtttttgcctagtaattctttactgtcttcacagccatttgaagcctttagaagtgctttttgtttgcttgcttaactgtgttacctggcatttttggttatttcaccagaaacattgatctacagctagtccaccagtattggaatggaataggaagtgtgaaccccgaatatctgagataggtctcagttaatttagaaagtttgttttgccaaggttgaggacacgtgtccatcacacaccctcaggaggtcctgacaacgtgtgcccaaggtggtcagggcacaacttggttttatacattttagggagacatgagacatcagtcaataaatgtaagatgtacattgattttgtccagaaaggcaggacaactcaagcaaggatggagcttccaggtcataggtagataagagacaaactgttgcattctttttttttttttttttttttttttgagacggagtctcgctctgtcacccaggctggagtgcagtggcgcgatctctgctcactgcaacttccgcctcctgggttcaaacgattctcctgcctcagcctcccgagcagctgggactacaagcgcgtgccatcatgcccggctcatttcttgtatttttagtaaagacggggtttcaccgttttagccagaatggtcccgatctcctgacctcgtgatccgcccacctcggcctcccaaagtgctgggattacaagcatgagctgttgcattcttttgcatttctgatgagcctttccaaaggaggcgatcaggtatgcatttatctcagtgagctgagggatgactttgaatagaatggtaggcaggtttaccctaagcagttcccagtttgacttttcccttttgcttagtgaatttggggccccaagatttatttttctttcacatttacccccttttctttttaaaaatctcttggagaaagcatttttggagaaagcattttagaagaaaatgagtctctggtctcaggttttgtctgatctctcatggctaggatggtttattcctagacaggtaggtcctgagttattaggaattatattaatagaataatattaggaatattattttagcaggttgagaagtctcatgtcctatgaagagaaaatagggggaggaagggagaaaaacaacaacaaacaaaacaacaatcctggaaaattgatagaggccacgttactctgaagtccatgtatcagtaggcaggtatgaaagtggcttatgtatgtaaataggttgctgttattttcttctgaagtttagttgtctggattaagtttgcaaggctttaagaagcacagcttagttttcagtgatttcaaattaggaaaaaacggaaggaaaaggaaaagaaagaaaaaattgaaaacattattttggaaacttatagccaggaaaaattagaattcagcccaaactatagaaaataataaaaactggaaaacattaggactagaatctagcaacaggtgtgttatagtttttgaaatagaattcgtctctctctccagtttcccgtttttactaaagacaaatcatggtaggactgatttgctttattatacttggacagattatttgtataaagtgcagcgagagtaattatttctcacataggcttttaaaattggctttggtggaactttgttccattgaaggagtctcagataaggctttttaaaagacaagcccagccgtggatttgtaccatcaaataactatgagtcaggtgaatttttcttcctcttgaagtcccatgataacctggggctcctgggcctgtcagaaagtgacattctttacttaccacaggtcaggaaccctgtacagggactgtgtagacaaggtatgaggctagttttcccaaggggattttattggctctgtaagttaagtttgattccttaaaggaaagcataccattctagtcaaagccttggtaaaataaccagtttcgcctgttacaaatgaaaacaaacttttattgtacttatgcaaataactatattgccatacattaagaatactcacagatagtttccaaattctggaggaatcaagtagagagaaacaaatatcctccaaattttgttcataggagtatacctagtttctgtcaatagctcaaaagaaaagtttccttgactctaaaaaacaaaggatcagcaacgttttaagcaaaaagtcaaaaagataacttcagtccactattagttcagtccatgcagttaattcctgttctgcttgatatccatgaacatttcgctctccatgagtcctgaaagtttttcgtcatcctgatgtcacaatctccaaagttatcagaaacctgcattcaagagcacctgttagagttttatagctgattttaaaaccaccttctaaagaggaccaaaaggagacaacaattgtctgtagatgacaaaaagtttttatggcagccatattcagagacacaactgacaaggaaatttattgtctctgtggcacacaataatttaacataacaattataattattactgctaataggcactaagtcataccagaattataggagtttcctataattttgcaacacataccaataacatttatacaaatacagcccaaagaaagccaaacagcattttatatttgacaatgcttcctgtataatttttaaaccaaataagccaaatatgccatttttggactttagggaacctaatatcttaaaagattaattaggtcagaaaaagacataatttataacttgattttggaaagtttgtccaatatcaagggtttaaaacacatgatatcacaaaataggatcacaagtcattatgaaataagtcattcatttaactaaagtgataactcaaagatttccataaaaaggtgaaaaccttcattctttgagaaaggagacttaattttccaaacaataagcccaataaaagcagcatgaagccaattaaatttcttttccaaaattttataatctataatattttaatcttgaccataatatataacttccataagccttttataacctttatagcctttattaaggagttggctaatgcttcaagaaaagcttgttaatccgacataggagcccgtatgctggtcttgcatcagtgtacctatgacgttaatggttaacttatagagaaactgaacttattttatctctcaaaatcgacccttacaatctcacgcacccccctcttccactatagtccctgggccttgaggagttgaatagctttaatttctggccctgcatctcaggaatggagtttatttcgattggcatctccttccaggcctgaagatgaggctttaattgctatcactgtttaacatttaacaggacctggtgtcctttttagacccaggagtcaaagccctgtaactcagtgtcacaaggactttaaaagcacatacagaaagatacatggatgtaataaccttaattttattattttttatttttatttttattttttgagacagaggtttgctcttgttgccctggctagagtgcaatgatgtcatctcggctcactgcaacctctgcttcctgggttcaagcaattatcctgcctcagcctcccaagtagctgggattacaggcatgtgccaccattcccggctaatttttgtatttttagtagagacggggtttcaccatgttggccatgctggtctcaaactcctgaccttgggtgatcactgccctccttggtctctcaaagcactgggaatacaggcgtgagcccccacacctggccgataaccttaattaaaaaaaaattttttttaatctcagttttttcctaagcaaaccaaatttaataataatggcataggaattattttgataaaatgtaaaatctgttagaccaattaccaaaaggcaaaagaagagaccttctgcagtgcacagattatattggaagaaaacattccttttagacctttaaaaaaatgttagaggacagatgcggtggctcacacctataatcccagcactttgggaggccgaggcagtggatcacctgacatcaggagttcaagaccagccaggccaacatggcgaaagcccgtccttactaagaatacaaaaattagctgcatgtggtgacgtgcgcctgtaatcccagctacttgggaggctgaggcacaagaatcacttgaacccgggaggcagaggttacagtgagctgagatggtgccactgcactccagcctgggcgacagagtgagactgtgtctcaaaatcaaccaaccaaccaaccaacaaacaaatgttagcatcaggccacaacaaacagaactcaagggaaaaaaaccttttatgaactgaaaatgagtcgaaggagggcagtactatttcacacctttaaaaaggggagagaaaaccgaaaatggcaagatgcaagaaaggttgaactttgggttaaaaaaaattacaatctcttatcatttattaagagtaaatcaatcccttaagaaaatgttactgttctagtcagttctttagtgtgtaagtggttttttttttaacatcaaactcagtctctagaaagaccattttaatttctctttaatttgatcatataaaagttttgtctttttaataaatcctcttattgtgacttacatacaccattcatgacatgcttggacttcccgaatgtccctctttcttaaataaccagtcattttattctaggactgcacttaccattcaagattgtttctcatataaaattatttctctttaagctttcttaccaaaaaatacctctttattgctgtaactttctatatatttctcttatttcctggttccttttaccttgttttatacataacctttaaataagctttgaattagacaaaaattgttcacctttttaaaaaggacacatgtatttttttagaatgttttcctacaatatatttttattggaatatacctaaataatgaaatatctgttatttaatttaactttagattctaaattatgacaagtttgtctacaagtatttatttcattacatttacctaattattttattctaatcatttacctagattacttatgaaaactacaacagtcatcatttaaagttgtgaagcttgccattgcaaaattataacagagacagtgaaaaagatatgatctgaccgcctccatcttgcttctaacctccaagctgtccttgttcattgctgagcataggccaaactaactttgggaggaacttagtttatagttttgaaataaagacaacagcagtcctttctctaaacaaacctccttactgcctgtggactagactgcctaaagccacaagattagaagttatggtaattttactaaataattcaagatgtagctgttttcattaaattaatatcaatatcttatttattaaaaattatacaagcaaagatcattctgttttaagctgggtttatagttttgtaacccctatgccaaattttgacacctaatattacttggcagggataagtatgtcctggtccctcatgcatcagagggtgcaagagaaaggagagacagcagaagtaaatgaagaaaacagaattcaatcaactgagaagaaaactctcgctcaaaaaaaaagacagtgtcctaggagaaaaacaaaaagtatgaaggccttttaaatacacacacacacacacacacacacacacacacacacaccccttggatgttaccttttaattaaactgacttttaaccattgagcttcttttaaaaaactttttaaatctcattaccatatttcagctggcacaaattgctactattgcagaagtaccaagcatcaaaccagaaagggcttgatttaggaaccaaacccaggctgtcccggtggaaaaaaaagaaggcagaacccttagctatggaactgcagcatggggcgacagccatcactcttttggtttggcatggctagcaaaaaggtggccgtgtgacgtaaataaagccctttaagtcaaaaaatctttccttttttttttccccttttgctggccatttcccccccccccccacaccgacaacacttttgtgtgtgttgggggtgagggggatttagccacttcagaggcctcgttccccataatttggaactttcctgtggatttgatcaggtcggatagagttgatgaaacccaatgggaaaaagaccaaaacaacaacaaaaacagaaacaaagacaaaacagtcaagcaaaacaaacgatggcacaacttatacgattactgaatgctttaatggtaaggagcaaataaaaccagctggttgttaatctttttttttttttttttttgagacagagtttcgttctgtcgcccaggctgaagtgcagtggtgcgatcttggctcactgcaacctccgcctcccgtgttcaagcaattctcctgcgtcagcttcccaagtagcggggattacaggtgcctgccaccacacctggctgggttttttgtatttttagtagagatggggtttcaccatgttggctaggctggttttgaactcctgacctcaagtgatccacccgccttggcctctcaaactgctgggattacaggtgtgagccactgcgcccggcatgttaatcttaactttagccaagacgaaccccaattcagttactgacctaggcctatggatgggtctcagtctgaagactgctctgtgccatccaagaagcaggaaaaatctcaaattcgtcttccctgttggaagcgagctcaaactccataaaggagttcatgccttccatcgtggaagcaggaaaaacttgccttctttgtgttggaagcaagtaaaacatcaaaaaaaaaaaaaaaggagttgtacagcaaaataaactttaaatctcatccagattttgggaaatcagagattctctggaggggtgcttccaggcctcagcaaattgtcctgttggtttgagccataaagatagctcaagctggtacaagcaccagtaggagatttgtcaaaggttaggggcaccttcactcagaatcctttcgtggttaccagaatgtgaaccccgaatatctgagactggtgtcagttaatttagaaagtttattttgccaaggttgaagacgtgcgcctgtcacacagcctcaacaggtcctgacgatatgtgctcatggtggtcggggcacagtttggttttgtacattttagggagacatgagacatcaatcagtatatgtaagatatatattggttccctctagaaaggcaggacaactcaagcagggagagggcttccaggtcacaggtaggtgagagacaaatggttgcattcttttgaatttctgcttaggttttccagaggaggcaaatcagatttttctcagtgagcagaggaatgactttgaatagaatgagaggcaggtttggcctaagcagttcccagtttgacttcccctttagcttagtgatttgggggccccaagatttattttcctttcacaggaggaactctgacttttgaaaaaaagatctgtgctgctctcttatctactcacatcatggcactcatgaaaaatgccaacatttgcgtgatacccttgggaactagatatagctgcttgctgtgagagtgactggccaaggggcctgaggctctgatctcagaagtagccaaagactcaaagtgtgtcggcttgccttacctattggaggcactccagcggggaggtacagcttcacaggatgcatttatgaaagagaactgaacttccagctaaagcagatagatactttcagagagagaggagagagagagagagagagggagagacagacagagacagagagagaaagagaaagaaagaaaagcacggacagctttcctggttctgccctcccactattaggtgtagggcagagttcctcaacctcagcactattgacagataatactttgttgtggaggactacctgtacatagtaggatgtttagcaacatctctggcttctacccattggatgctagaagcaacacccaacctcatttcccagtcgccactgctaaaagtatctccagacgttgccaaatgttcctggggcccagaatcatccccagttgagaactgctggtgtagggcagtcagtggttctcaaacttgagcatgcgttagaatccccaggagggcttgttaaaacagtgctggttctctcctccagcctctgatgcactaattctggggcgggatctgagatttttcatccttaacaagctcccaggtgatgctaatatggctggtggatgaccccgcttttgagagccactaatgtggagaagaaacacttgagttagaaatcaggacacttcagttctaattccatctctgactgtgattgtgtgaccctaggcaaggtgctgcgtttttctgtttctttgctcaaagtgaggagatcagactgactcttttcttaggtcacttaccatattaatgaaatctctgaaaccctcatgttcttgcgtgtaacacagtggttctcaaggtttggttcattcagtgcctgttctagtgtctgaaggcaactactcctttacccttctttttcttctgtattcagtatttgctttagggtccaagaaagagttgaatggcttgagaaggaggcttagaaaataatcaaatgcccatttttttcatggtagtatgaatatatcttttaaaaaataactgcattttcaaatgtagtcagtcacctaacaaatcccagtgtggcattagcaatccgtgggaaggtcttaatcaatttgtccttgtacctattaatttaaataccatggttgtatgttgggtgttggggctttttgtaagaaggaatataagcaacactgcaagactcatgagatgaaatgcaaatagaactttttgaaactaagaagcagtgctattttagatgagggaaaaaacactgctttttacatcttagtaggaaatcagaaatagagaagtcctgattatcagaaatggaatgtgagaaagaaaaattagctttttgaggaaacaaaacacgtttacctcacgtaagacttcttagattacaactctcttaggcatatgtttgtgcaacttctttatgattatatctgccttccctctacctccttctccagtgagaacatgtattaaatgaaggttttcatttttagtacttgtagattaggaaggggttgcatggtcaagcattggtacctagactccataccttaggctctgaaaacatgggaactactgctctctttgagaacacacccgtgtggcctcatttcagatgtgcatatttattcccctccttgatctccctaccttcaaaataaaatgtcttccatcttgccttgccagttggatgcttgaaattcccacagtgttcattcatgtagtcttcatttctgaagccctcactggactagtctccagaaattgccttcctttcttggtttcttgaaagacattttaacatgctgaaacctttggaatccattcattctttctgtttttttagtccattcaatttatttatttgtttattcaatcattccagttccctaacctctgtggaaaatacaaatgtgaagaagacattctcagattaattagatttcttttttgacttcgtattgttgttgatgaagagtcaaactgtaaaatattttaggagatttattctgtgccaaatatgggtgaccatggcctatgacacagtcatgagaacatgtgcctaaggtggtcacggtacagcttagttttatatattttaggaaggcatgagacatcaatcaaatacatttaagaaatacattggtttgattcagaaggcaggacaactcaaagcaggggcttccaggctgtaggtaaatttaaacattttctggttggaaattggttaagtttatctgaagacctgggattaacggaaaggaatgttcaggttaagataaaggattgtggagaccaagttttattgtgcagaggaaactctcagactttagagagagcacgttgtaaaatgtttcttatcagacttaaaagggtgcctggctcttagttgattgtctcctggatctggaaaggaaggaagaaaaacaaagggaaaagagggggttctctatagaatgcagatttttcccacaagagactttgcagggcaatttcaaggtatggcaaggaaatatattttgaggtaaaacattttgattttcttccttgttatgccagagtcactcagattggaaagtaagtcacgatatacagggttaaaataaaacccatctgatgagaatttatggtttgtagggcgtgactcctagaccccttaggtaggaatttgggcaagataaaaaatcagaacttggtcgtcattattgtgctagttagtgtgggttggttttgtttgtttgttttttgagacagagttttgctcttgttgcccaggcaacaagatcgtgcagtggcaccatctcacttcactgcagcctccacaattctcctacctcagcctcccaagtagctgggattacaggcatgtgccacctcgcccagctaattctttgtatttttagtagagacagggtttcgccatgttggccaggctggtctcaaactcctgacctcaggtgatccacccgccttggcctcctaaaatgctgggattacaggcgttgagccactgtgcccagcaggttttttgtttgtttgttcgtacctctgtagtgattttggttttgacttccaagcattgttatattggaaagaaaagggtgacagggatgggtttgtgaagatgaggaaattacggttaattatggcaactgcctcagaatagccagacctctagggaatttacaaagcctgtgaatcaaatgttccgtttttcatctttaggagatccaaaagtgaggtcgttggagagaatgcagagaggcactgaggactggaagttttggaacatagtgccctcctcaactttggatttcaagatgatttgtcctaagaaaactaagcaattatttatgattgactttattcacttgaagatttttataaagaacatgtgaatgaggaagatacaaaaatgggccagataggagagaattttttattaactagttcattggaatagatgataagctatgtttagatattttgaagatttttagaaatgttatctaaaacttggagaaaaggcaaaaagattattgtgtgccctttcagtgtcactcaaaagcatttgtttggaaagtccactgaagggacatagaacattcctggagaaggtaattatttgacttacttttgaatagagtttagactctgtaaagttagatattaatttatagaaaattgatgttacaaatgatttttgtccagtagaaattaaatgattcctgttttaatagaaaagataacctcaaagattatggtttcattgctctgaaatgaaacattaaccagttttatatctaactttgcaagattaatcagcctttgacacatatatactaaatatttttatgagagctgtgtttttagctttttgaaaattagacttcgacataatgagtacatattgagcatataagaatattgagcatataagcatcttggatggcttagactattgcccaagagtaaagttttgactaaattgactatgatactctgtcagccctgcattcctgtacttgtgggtgtttatctatattctcttggtcacgtggatagtaagttgctcttaaggataatctaattatatggcctggatgaagacttaaaattcctgccttatcaagatctcaaatgacacaaagtgcaaagggataatttcttttgttgttgttaatagtactactgttgacttgtatagcacttaaaatttacgaaagattggcacacctgttattatatttgatcctcaggatttctgtgtgaggaagcaggataggaattattatttacaacttacaggtgagtaaactgagatgctgacagataaagtgttttgccaaaggacactcagctgttaaggaatggagctgggaccacagcccagctattcactctccaggtacattcagcaacttcataatggagccagggttcaaaagggacattgataagaacagtgaattgaagtggaaaaaaatctagtaacactaaaggaataaatagaaaatcctataccccagcttcatatacttggtattgatttaccattgctaactatcatttcagcttttttaggttatggggtctgtttctaactgttggaaaggcctgaagtgcgtctgaatcttctttgacctcttctcccgcctcgggtgtaacagtgctggtcacatggcaggtgctcagtatatatttctttattgaatgtatgtatttgctttacatgattttatcttcttgattattcctttcttcctggaaataccttcttaattagcaaatttcagtaaatcagggtgacactggagcagctgcacttgcttattcaaaagggtaatctgccctattatttgatgtttgtactggaaagaggactgctgacttaatctaatttcatctttttattaaatctctctaagtccacaaaccattgattaattaactcaacagatgaacaattctgtgtgccaggcctggggaaagaatggtaaggatgaggcaagggcccccctttcatggagttgacacttcctttggcttatggtcctggtggtggttttactttttctcttgagatgtttttgatcttggctctgtttcattagtaatctgagagccacatgaaacaattgagttgtgagaaaaaccgtctctaagacttacaatgtatgactaagaattgctgtgccttgtgaaagattaggactaaaaccaaggtcagtgctagtggactccccacaatttcaaaatgggataatttgaggatagtggcccagaattgtaatggcttccttttgaagctgtatttgcataccaagcatgctgttattacttagattgtgtgtgtatttcttgtctgatggaggttgtggggagttaaacccctcaggcctcaccttctagccattctagttccatccccagggactgtctttgaggttgtggggagttaaacccctcaggcctcaccttctagccattctagttccatccccagggactctctttgactagggtcccaagacacgtaatgaactgagttgttcagcataagacaatgtgtgaacattttaaaaatggttattgattgtgataggaattcaggagttttagagatcagttgagactggttttggtcaggagggcaactcgatgggtttttgaggcatatttgataatattagctaccattgattgtggttaatgtgtgtaatgcacatcacagcatccccacaaaatacatgctgtcttccccattttaggatgaggaaactgagacttaggctggtgagaatttgcccaaggcttctcagggagataggagtagaactggattcagaatcaagtggctttccatagccacttgtggagagaaggtggaagcactatggatccgggaccgagggtcccctggccattggaaagatctttgattgggccatgagaaaagaatagtatttttagtcatgttcatagctgatttccatttgtggctccttgtgtttcatctccacacagcacaggtggaggtgatatggttagggtgcggagtcagtgcagggccatgccgaggggccaggttggcaagtttgagagctgggttgaagcatacaatggtcagattgtgcgggagccaaatgccaagtttgggggctgagactattatgcagacagtaaaaaagaatggtaggtttattttttatatttttatggttacatagtagatatttctatttatagggtacatgagatattttgatataggcagatatgtgtaataactaattacaaatgggacaaatggggtatccatcacctcaaacatttattatttctttgtgttgctgacattccagttatactcttttagttatttttaaatgtacaataaattagtgttgactgtaatcaccctattgtgctatcagatactagcatttgattcttattcattctaactctattttaatagataaaatatgatcagtcccctgcccattggttacccatgaacatccccaacccttcccagcctctggtaaccatcattctactctctattctactcacaagttcgattgtttcaatttttagcccctattctaatttttaacttaaatttaatttttagctctcattcttctcacaagttcaattgttttaatttttagctcccagaaatgagtgagaacatgtgaagtttgtctttctgtgcttggcttatttcacttaacataatgacctccagtccatccatgttgttgcagatgacaggactcattgttttttatggttgaatagtactccactgtgtatatgtaccacattttctttatccagtcatctgttgatgggtacttaggttgcttccaaatcttggctattgtcaacagtgctgcagtaaacatgagagtgcagatatctcttcagtatactgatttcctttctttggggtatatatctagcagtggaattgctggatcatatgaacactttagttttagtttttgagttgtgggttttttaactggcaattggtagggttgaaaactgtgcaggaagggagtaagacaggcaggagatcaggtagaggctagaagggtcttaattagggttgtagaagtgaaaccagggagaaatgggcctctgaagacactgttgaattcctcttattaccgctcagccccctggccattggaaagatccttgattgggccatgagaaaagaatagtatttttagtcatgatcatagctgacttccatttgtggctccttctgtttcatctccacacagcacagaagtgaatgtgcatattagtaaatgttgaaatagagttctttttttacttgattggcacattagattctgttcagatgctcagtccttattttgcttcacgtccatcatggctgtgtgccccacagcctaaaaaagtggcagaggaaatgttgattgtaaggtctcaagtccacgggacatcagggccttaaactctctgtttattggcctccaagtgaactgtaatgagattcagtactaacaaatcataaattccttttcttggacagttgaccatttcgtatgaaaagacatgggttgcaaaacgaaggtaccggttaagctgaggacacttgtttaaaatattctcatttagctttcccacattgtcaggaacccagggccatttcctgttcatgtttgtgtttgtatcagcgtctccatgtttgtttctccggagaagtcccgggcagctcacatgtccagtaactgcagatgagtgttctaccatggtagtaccgctggggctagggagggtattcttaggaatgacactagaaagaggaagtgaatccagattaactagggtgagtgtgacagtttgtagctgggagagccccacagatcattagcgccggcagggactgccagagtcatttaggccagtgtgttcaggttgagcctgtcctggtagagagagggaaggccttgcagcagggactctagggcccctccaccttcttcagctggaactattctactttgatcagttgtatgtattagggttccatggaagtgttatttttaaaaataagacaattattggctgggcacagtggctcatgcctgtaatcccagcactttgggaggccaaggtgggtagatcatttgatgccaggagttcgagaccagcctggccaacatggcaaaaccctgtctctactaaaaataaaataaaataaaaattagccaggcctggtggtgcatgcctgtaatcccagctactggggaagccgaggcacaagaatcacatgaacctgggaggcagaggttgcagtgagctgagattgcaccactgcgctccagcctgcgtgacagagtaagactctgtctcaaaaaaaaaaaaaaaaaattaattatttattaatttaaaaatttaacatctggctattctttcatggtacaaagggaaattaagtcccagagtaggagtgtgcattatctgagcctgagttgttggcgaatggcttggagtgcctttaaaaaacaaaaacaaaaacaaaacactgggcgttgtggctcacgcctgtaatcccagcactttgggaggccgaggagggtggaccacaaggtcaagagatcaacaccatcctggccaacatggtgaaaccccgtctctactaaaaatacaaaaattagctgggtgtggcggcacgtgcctgtaataccagttactcgggaggctgaagcacgagaatcacttgaacccaggaggcagaggttgcagtgagctgagattgcgccactgcactgcagcttggcgatggagcaagactccggctcaaaaaacaaacaaacgtccggcctgggcaaaagagcgagactccgtctctaaaacaaacaaacaaacaaaaacaacaacaacaaaaaaacacattatgtggtcacagaagtgcctttttgagccctattccagacaggagtggagttgtcaggagtcacggaccctcacttatgtttctgtttctgacactttggtgttatcagtaatcaagtggtcgaggatttctagcctttgaagcagacttggttcccatttggaccccaatgccatgtcagctgaggtgtctacctctcacttcctggaacagttgaggcacttttttttagccctggcaggtctcttgcttggccatgaaatttggggattcacctggccagctacataaaatagcccaaaagggtcagtgtcctaccgcctctgcagggccacaggctgcctgacagtctatcaaataagtcctcttctggaggcagcctgagctggttggatcattggtgtaaggacaccaggagagcatgttggagttagctcagccggaatccatgtcattactctgctacttatagctgtatgaccctggacaagttacttaaccactttggcctctgtcttctattagtaagttgggagaatctcttaatattatgtgtaaaatgagcttggtgctgggatttgatttttcaccatttctaccaactgtcctctaccaggaccttatgaattgccctgaaaggtgctggttatacctgcaaaaggagagtcttgagtcactggtggagagcaggcacagagtctagaggtccccacaaaattaaatgagccacccattgagcagacaggatacttccaaggagtggtagtctcttcatgaagaagaaccacccagtcatcagagctgtccggttagagatcatcttgtgagataataaagctgatgaagatacttatgtaacttaatatatttgataaagaactttccaactcctactttattggtttcttacaacactcctatgagagaggcgtgggcagtatcaatattattctggttttatatagggtaaatccaaggcccagggaatttaagtagcttgtcaatgatcacagagtaaggggcagatctgggacttaaaactgagttatttaatgacttgaatattttgtttcctgttattatgattctgccaagaagctgccatcaccagaaggtctcaggcagatgctggtcatgaatactgcagaaggcatttcagatcagcttaggtgattgctgtgtggtttgggggaccacaggattcccccagacacctccctcactcgtcagtcggcctcgtttggcctttgtcactgcatttctttgagtcaagacctggactctcttgcttctcttcgagacggagataactgtatgaagagtgatacatttgtcccagagcaccttcgtgcgaatgcatgtactggatcactcttctccctgataaaagctgaggcaaaagaggttcattcagcaaaccttatgtgaataattcctttttgtcaagtgctatgtcaggcattgggaatacagaaattaacttcacacattcctgtcctcaaggaactcttagatttgcaggagaggcaaacacaatgttggatgccacgcaggtggcagccaagaagagagagcagtgcgctgccctgtgggaatctcagcccctcggagagggagcagtgagggagcagcacgtgggcagcggctcacattagggagcagcaaagaacctcatccagctggtccatgggcccgagaagggaggtcctgacagattttgggaactgtgaatgtctaactgaatttgaaggtgtgtgaagagttttagtggaagaaagaattggagaaataagactttgcatgtcatgaagaggcgtgaaagactttatttcttgagctgtgaggagttagtaatgcagggttaaacagaggcatcaaaatcagaattggtaactggttttccttcttccaccccttctctaaaactcagccagagcaattttcctaaggccagaggctgagtgaggggcgctgagggcacacccaggctgcgtgagcgggtgaggggaaaggggcagcttcaggccaccttttccaggtcgattacagttagtgactgatgacactggggtcaagggagagaaaaaacgtcaagagtgactcatacgtttttatttgagatctgccttgcttatttcacaaagagttgcaacccgaatgctgaagattttccttcatggcgagtctcagaatacaacctcagctcatttgccaaatcttgccagcctgataaacatttttcttttgggggctggcatctcgtttcctccttcttctcttctgaaatgattatagcaatttttgtacttcaaggaattggtgagaaccgggtacctactatatactcgataaatgaataatcaaataaatgagatcactaataaggagtgacatgtaaggtcacgctggtcatggtaaagtggtggacataaaatgcgacttgtgattctgaagcagcttatgcatttgtgctaaaatagtgtttgatagtggaatggtaaaatacagaattctgcagaatttttcagtacttacgttcacatataatgttggtcatgcctgagcttatagcagcagcagccagaggaagatgaggtaattaggcagatcacagcggaacaggttgcattctcattcctttcagccttctctcctctctccccaacctgcacagttctggtagggggtgggatgtgttacatgctttacccaggatcccaggcgtgccctgggttcgacttctttctctagactaatccagttcccagcctggagcctaagcatacactgcattaatcagacttgctggaatgatcacatggttttctagctgcctcccctgttagctgccgcttgtcagcagctggcggagctggaggctgcaggcccctgtctgcagaaagccttttacttcagaatattggggggtgtggaaaccccgcctcatttttctgcactttgcaccatctgactaactaaatggttgtcctccataccaaaaagactaccacacaatctaaggaaattgtctctgactaggtcatgtttgcatttgaagaattcaggtatgttctgggctttctacatcagtctgctgctggctttttgttctcgctaggtttttgctgtgtaatgacagcttaggctctggctggttctcacaaaaaaaacagggttcttttcagcttgtggtggggtttatcccagtcatgggggtgggaggtgcagaggtggtgcaggtcaggggtgtttactgtgtgcagaagtgcagcgtggataattggtctgatcatgggtgaatttgtccaggaccccaccttgtgccttatttgagctgctgttgctggtgtagagttgtgaatacagaatagcaactgtgtgtccagaatgagtctcttgctatcttttgtttttcttcctttgtcaactcatgcagtctactgctctttttaaaaaatgctgattgtagcagtgaaggtgaaaaattctacaagtctgtctgcatagttgagatttgattttggctcttcttgtcttcattatttttagtagtaatctcatcgccggtctgttttctggaaagtgccctgatagtgttttgttaacagggctctttgctttcgtatgcttttcagctgctgtaattattagtgctccaaattagatcttttgtgaatcttactccctctcttctccaggaatctatccctgtatataaatgtgggaagggatgttccaatagaaggagtttctaagaaatgaaaataaaggaggcggaatgggagggtcatcagattcttcttgtgcatatttccacctctctggaacatatggaagagagtgtgtgtgtgtgtgcacgcacacacacacacttccgacttctgaaagcttctcatttttcaaatgcaatttttgtgcattttagaactgagcataaattccatattgatgggcaaagagtgattgtgcgggaacctcagttctacctctatgggccttttttattcctccaaatgttgctgcggtagacattaaaacaataagagaataaccacctttcattcttctaagagaaaactacagacctgttagccagtcaagggagtagataagaggatcattagatctccacaaagaaaagtcggaccgtaaaggtcgtcccctgcccttttcagtaaacttgatactttggattcaggaagttatcctttgtttagtcgtgtgtctctgcattatttctaatggcctgggtttgcgacaaagaaattctttttatgtggcagtgtgctctggtgacatgggcccctgcccttacagagtgaccagaacttttataatagccccattagatgactaacaagaatttatataatgtctggcgtgttacagtagataggcccctgggttctaatgtctgtttcagaagtagcttttgtgatccttgtgagagttatggaagcgttctgtaatttgtagaaagtagcgcaattgcgtagttcacgttttattgttagcatttactctagatgaagtacccctgtctaccctcttgaacagagcttggagcctttcattacgtttcatggttagggaagagggttatgtatgaacacatccactcgcattgtggtgggcttctaatctaagggtcaagagctgggtctgatgaggtgggagggggttgaattaaaggccattgcactgattgagaaaagggggctatcattatgaagggtagaccacaaaggggagggctgttacctcttgcttcaagcttttgcctaagctggccctgaaaaattttactggatgtgactgcattttgtgactgctgcatggtgtcagacaaatggctttcttctctagtcatggagtttgtgtatgtgggggccccgtgatcatggtggggcaacacagggactctagaggtacctggctttttagcttagttcagtggggttctctagctttagcatgcagcagaatccctggaaagctcattaaaactcagattgctggaccccactcccagaatttctcattgagtagatctggggcgaggcctaagaatctgtatttctaacaacttcccaggtgagtctgatgctgcagatctggagaccagacttaacaaccattggcttaggaaaagcagaagattaccttcatggagatgggaagtttgaggcaaaggcagggtggaggtacgggtaagaaaaattgagagcagacagaagcaggtcaaggacaggtaggtgaaccaccggtcacttggggaggttttgcagagcagtaagattataaaccaagttctctgtttctttgggatgagaatcagagaacttggttttataatctcggtgccgctatgaactaacttggtgggcttggcaagtctcttgatctttcttagtgtcagctgaaatggggagagtgattctcaccaagaaactccataacactgttagaattaaatgggataatataaactttatgaattacagcagttcttcctacatgaatataaagggggaagcacatcctggggccggctccatcaggttatccacacgtgcctgtaggcctcgtttgtggacacgctcctccacacatccccagccctgagagcagaaggaagggccacattcttggtttgttttttttttttttttggagacagactcactctctgtcacccgggctggagtgcagtggcacaatctcagctcactgcaacctctgcatcctggattcaagcaatccttctgcctcagcctcccaagtagctgtgattacaggcatgcaccaccacgcccagataatttttttgtatttttagtagagacagggtttcaccatgttggccaggctgttcttgaactcctgacctcatgtgatctacccaccttggcccccagaagtgctgggtttacaggcgtgagccaccacacctggctggccacattcgtttttaaaaggaagtctgattttgactcagatgcatttacttattggactatgaattccatgagagcagaattcataaaaacaacagaatcctgcctgtttttgtttccttggcacctacaactgcttgacacacagtaagaccttaatgagcagttggtacagtgcattttaaccagaacttaaggaaaagcaagcaagctatccagctagctcggcacagtcctgaggtcggtgccatggtgccacgtgggctgttttgtgtgctggttcaggagaacgtgtggaaaagctgataactgatctcctgagaaaagcgtggtgtcctcagcacaccccacttgctggagtgccagagaagtcatcacgtttcattaaggaatccctgcagatgatctcactccactgagcactgatggttgtgatgatttactgctgcctgggtcccacgcctagagagtaataggagcttgagaggttgggccagtgttttacagctgcctaggggatttttgtctgccattgcctacaagactattgttctaccaccaggcaagctgttctagctggctcttggggtagacacaggtcacttgtccttttgcccttttttttttttaattttttttttttggaacacagtctcactttgtcacctgggttggcgtgcagcggcaggatctcagctcactgcaacctccacatcccaagttcaagcaattctcctgccctagcctcctgagcagctgggattacaagtgcccaccaccaagcccggctaatttttttttttttttttttttttttgagatggagtttcgctcttgtctcgggctccagcaattctcctgtctcagcctcccgagtagctgggattacaggcatatgccaccatgcctgactaattttgtatttttagtagagacagggtttttccatgttggtcaggctggtctcgaactcctgacctcaggtgatccccctgcctcggcctcccaaagtgctgggattacagacatgagccaccgcacctagcctaatttttgtaattttgtagagacggggttcaaccatgttgaccaggctggtcttgaactcctgacctcaagtaatctgcccacctcagcctcccaaagtgctgggattacaggcatgagccaccgtacccagcctccttttgccttttttaaaaactttcttagacatccttctactgaactgaaagttttaaataaacatttgcctgtttctacacaccacagagactgtcttgagcattttgtgaaataccatgtagttttccttctacctctggacccagaacagtgcctacatttccttaccaccccagaatgaagagttttaaatgtgactttttcccccataatccgtcaagcaagaatggagcccaaatcagagacttctgtttctcagaactcctggtatttgacttattccgatttatttccgggaggaatgtagtgtaccaagatctgaaatccacaattgctatttgttagtcacgtgaaaatggaagttactattttgagtctgttttatttttaaacaaaaacatcatggaagggtttgaagttcaaactctaaccaactttctttattaattcaaatttatatctactcttgggaaatgtgatggtttttcttgccctttcactggaatattgaaacaagtcaaaatgagtagtattggggaagacttgaagatggcaaggctaaagaaccatccaagtgtcaagagcccaagccagcttggtctctctcattttccaggctcctgtagtaccttgaagaaacagatgtttagtacattgatctgagctgaggaaataagtctcagatgaacaggaggtagagactgggccaggcagggaaggggaaggaaaagaaccttgatcattgaatacctgctgtgtgcacaatcactgctgattgctttgcccaaggtaactttaactcacataaatgaaatggactctctcctccataccactctagccacgtgggccttgtgctcctcctctagacctcttcactggttgtatctctgcctggattgccctgcccccaggcagccatgtggcttgctggagatgaaaacacagtccacatcagaacttgtcctaaactctgggcccatatatccatctgcttgtttgatgtcactactggaagcctaattaggcatctcaaacatgtctaacacggttctccagctctttcctgtcctttcttcagtcttccgcagcccagtcagcggcagctccgcaactccttccttctagttgttcagtcattcttgacccctttctcctactctccacatctcgtctctcatccatcaagcagtcctaccagctctgtctcagaatatacaccaaatccaaccacttcctactggctctactaccaccagccttgtccaaatgccagcatctgaattgctgcagtagcattgtaactgccctccaagctttctgccctgttctctagtctcaatttttcacccattttcctttttaagataagaagtcaaatcatgtcactcctgttctcaaaccacccacctcccctcccagtaacttcccacttcactgagagtgagagcacaagctcctttaatggcttaccaggcctgctcagcctggccctcttatcagattccatctctaacagcaccctgtctcctccacaccactctagccttaccagcttgtgctgttccttgaacacaccaggctgcctcctccttgaggcctgtgcactgacagtctctgcctggattgctctgcccccaggtggccacgtggcttatgccctggtctcttccaggtctctactcagatgttaccctgacctgtctttttaatatccctctccccacaatgggcactccctttctttttactctgctttattttttgccagatcacatatcaccatctatatactgtagctttaaattttatatttgttattgtttacctcccttagcagaacctaagtgccacaaggataggtttttaaaaatacacagttggcggggcgtggtggctcacgcctgtaaccccagcactttgggaggcagaggcgggtgggttacctgaggtcaagagttcaagaccagcctgaccaacatggagaaacccctactaaaatacaaaatacaaaaatacaaaattagccaggcatagtggcgcatgcctgtaatcctagctactcgggaggctgaggcaggagaatcgcttgaacctgggatgcagaggttacggtgagccgagatcgggccactgcatttcagcctgagcaataacagtgacactctgtctccaaaaacaaacaaacaaacaaaacacagctgtggtggggcacagtggctcacgcttgtaatcctagcattttgggaggctgaggcggatagattgcttgagcccaggagccccagatcagcctgggtaacatggcgaaaccccacgtctacaaaaagtacaaaaattagccgggcatggtgacacatgcctgtggtcccagctgcttgggaggctgaggtgagaggatcatctgagctcaggaagtcaaggctgcagtgagccaagatcatgccactgcactccagtgtctcaggaaaaaaaaaaacaaaaaaaaaacacaacactgttgtgtccatagtgccttgcatacagtaggtatctaataaatatttgttaaatgaatgaaagaaatgagaacagacactcagagaggttaagtaatttgcttaaagtcacccagctgttaagggaatcagtcagtttcagttcagtccctctttcccagatactatgtgcctgaaatgccatcctataaattgaccctgtgtcttaaccatcagcccaacctttcagtctttcctgtgggctcagagcttgtcgtggtgcctggcacgtgctccacagatgtaggaaaagtagggaacttctagaaaaggagcagagggcttggggtagaatgacctaccctcctcccagttcccacggctcttccatcccatctctgtgtagtgcttactactgtgtagttgtatgattattagtttctctcacatcttcttctctaccaaagcatgagctccttgaggtcagagagaaggtcgtcatcttgtatccctaccaactactgctgacagcatactctcagctctgggacgtattattaaatgtctgataatgaaaatactttgaattaagtaagtcacagtccctaactgtgggagctatgatccctctctgtcttggatccccggggcctgttggaatctacaaccatgtggatctttgatagatgatggtgggagcactggttggtggaagaatgcagagggcagacagaccagggagagagaatagagcaggtaagacagggatggacagacctcattgacttgacagtttcacctggtgtccatctgacaagccaaaagcaaggtgttatttggggaaacaaattatttatttataaaaattttaattattatagatactaagtatacctatttatggggtacatgtgatattttgatacaagcatacagtgtacaatgtgtaatgatcaaatcagggtaactggaatgcccatctcaagcgtttatcatttctttgtgttaggaaaattccaattacacttttttagttattttgaaatgtacaataaattactgttaactcttgttgccctattgtactactgaacactaaatcttattccttctatcaaactgtatttctgtacccactaattatccctctttattaccctctccccgttacccttcccacctctgataaccatcattctactctctatctccatgacttcaatttttttttagctcccatatattagtgagaatatgtagtattcgtctctctcgtgcctgcctcatttcacttaacgtaatgtcctccagtttcatctaggttgctgcaaatgacagaatttcattttttcttatggctgaataatattctactgtatatttataccactttttttttaatccattcatctgttgttggacgcttaggttgatttgtatcttttttttgtttagacagagtcttgctctgttgcccaggctggagtgcagtggcatgatctcagctcactgcaacctccacctcccaggttcatgcagttctcgtgcctcagcctcccaagtagctgggattacaggcatgcgccactatgcccagctaatttttgtatttttagtagaggcagggttcccacatgttggccaggctggtctcaaactcctgacctcaagtgatccaccctcattggcctcccaaagtactgggattacaggcatgagccaccgcacccagactcaattcctatctggaccgttgtgactaatgctgcagtaagcttgggagtaaaatcagtctcttcagtataccaatttcctttcttttggatatatatttgacagtgagatttctggatcatatggtagttctacttttagttgtttttttgtttgtttgtttttttttttttttttgaggaacctccaaactgttttggagtgtccacagtggctgtactaatttatattctcaccagcagtgtacaagggcccccctttctccacatccttgccagagtcacttattggctgtctttttgataaaactgtgtgagatgctgttgtggttttgatttgcctttcccagatgattagtgatgttgagcattttttcacatacctcttggccatttatatgtcttttgagaaatgtctattcagatcttttgcccatttttaaatcagaatatatgttttctttgtattgagttgtttgagtcctttatgcactgggaagcagataatttagttgttaggatggcaaagcagatatacttaaaaataacaatctatcggccgggcgcggtggctcacgcctgtaatcccagcactttgggaggctgaggcgggtggatcatgaggtcaagagatcagcgccatcctggtcaacatggtgaaaccccgtctctactaaaaatacaaaaatcagcgaggcatggtgacacgcacctgtagtcccagctactcgggaggctgacgcaggagaattgcttgaacccaggaggcgcaggttgcagtgagccaagttcacgccactgcactccagcctggcaacagagcgagattccatctcaaaaaaaatctattcttcattattaaataagcgtgcagttgttgagttttactcaaagtgaggcagtgttgtagatctagagtcccaatatctggctccatttcctacaaaagaaatgtaagctatgactgtcactttatttctctaggccttagttacctcacatatagcaaaaggactattttgaggataatgtataggaaagaagtgtataaattataaaacattgctgtattgtttgtatattttacattttgtaatcagtgaaagtttaatcagttaatgtttaacagattcaaatgccgtgttttaaaacagtttctgttatctcccattcctctttgcttagtgtaatagtagttgcttatgctaataacaaaagaaaacaaagaggaagaatttagctgggcttcccagaggagtgagtcctggaacagaataccaacttgggtctctatgtctcctgctgactacttagggtagttgcaaacatatcctcaactatgttggttctgaaaagtcaggcaatgggtcattttggaggtagggatgtgggagggcccttttgatactaggataaccattcattgaacaaatacttccagaacatctactcaatataagccacagtagaaaatgtaaatatgtgtaatccttagtcctgcctccaggaacactgtcctcaagaggtgtggaacagacagaccaaaagcatggagtagcaggtagcaaagataatactaacataggagattgggatagattccatagggatacagataacgtgctgtggccgggaggtggacacagttttgctgtataaaagttaaaagagattttcaggaggaagcatctgtgggagtgagccttggagggtataggattggggtggatgaaaatcaagacaagggctgttagtaggtgtgcgggagctgaggtataggaacagggggacagtgtgctcttagccatgctttagctgattgaggggagagtttttgctgtcttctcagggtataacccaggtccattttgtcctttccctgtgactggtgacttctctgccctgaagttggctactctgcagagataaacattttcacctctggggaataagtagtagtgatgggaaatcctactaggtgttttgccatgctgctagcaccttgacttttcttatcaccttgagcaattacttaagttctctgtgccttggttgccttacctgtaaaatgggactattaccaatctctgacagttactatgctaattaaatgagattacctttttttttttttttgaggtggagtttcgttcttgttgcccaggctggggtacagtggcgcaatctcagctcactgcaacctccgcctcctgggttcagtaattcacctaccgcagcctcccaagtagctgggattacagacatgtgccaccacgcccggctatttttttttttcttttgtatttttagtagagatagagtttctccatgttggtcagcctgctctcaaactcccgacctcaggtgatccgcctgcctcagcctcccaaagggttgggattataggcgtgagccaccgcgcccggccgagattacctctataaagcatttagatactcaataaattaattcttttaatttactgtaagcagcaaagcattttatagacacttatcctggattagaaattgcatgggagccaggaaaaaggctgatacattctccagctagagtacttctagtcttcccctctccctgagcgttcagactcagaatgccagaaatcagtccttggaagataatcatgtttgctactgaaatgtttatgacacagtgaacgaaacatggtgtgactaatcagctgagagcttggatcttggcttggtttgcatgcaaattccctggtctgagagattaataagttccttgcagttgacaaactgggactacagtgttttctggctaactgtgataatacaaccagagcccaccaccaagtgacccctggttctctgagtctgcagtgcttctgtactcaggccacagcccattgcattattcattgttgtacgtttctccgtgtcctatttcattatccttggagcctagtgtgatcagtaagtgtctgttgaactaactaggactacacgggacaactatgacgtatgaggtctcttccgtgtagggaagagtgaattacaagtgagaactcagtgaagagcacccttccaacaattgtagctatgatgtgatacattctggggtggttctcctggacagcaagagaatcaactaaagagctttcaagagtgactttcaacttgggaaatctatgtaatgtttctcaactgggaaggcccattgcaatctaaagacaggtgcccaggccactcctcaaacctcttaagtccaaatatgtgcaggtgaaacccagacatgtgcactgtttaaagttccactgatgattctgatgtacacacctcgttggagttcacgggaagaacctcagcttgggaacctggaaaccctaggttctaatgatgctgcgttagtttatgtaagtcacataacttcattgggataaaataggaataatattttatttgcagagatgttcagagaggagaatggccatgtgtgagctttcataatcaagagcactggaaaatgaaaagtgctataacatgcttttgaattccactggcacctctgaaggcagattgaacctagatgtgttagaagtgtggcttgtacagactacaatgtttgatctagaacttatgctggttcgtggtctttcctgggtttgatactcagtgactagtcactgggctcctcagggcatttcgtaataatttacagacatgaagaattcttttcactccagtcagccagttcagatccttccagatgccagggttgactcacactgcattctttgtgactactctgccccccatcttcatcagcacgagtgctagaagagagaaaagacgatttactttcacttgttgtgtggccctgggagaaacaggaacacttggagctctttcctttttgaaaatcaactctgggtcccatgtgcacagactgcacaccagagacaccaaggaagagaaccaggagcaaggaagatgagcgccccctcgcagggctcccctgcctagtttttcggaagttaccactcttattcatttttcactgtatctgctagatcagacaactgtgtatcaagtcaagatagaggcttcctaagagaggtgataaaagagatggataaaagtggtggttggatgtatttttatgagcagggcaatgaaacattctgtgatttaagaagtgcactcagtgatgaaattccttttcctggagagaggatgcatgcaaatcaaatgtaccttggagcacttccaaagccacagaatgaagattgtgtacttttattctccacctttttggggagtgaaggaatagagattcctaaggaagagaaggttgacacgttttgctacagttgataaaattcttgtttgttgtcctgggctgcttggttggggcattcatgattatcagatccctggtatgaacaaaatactaatcaattcatccctacccatgaccgaatgcttaaacacagcttgcttcatagaaaggtgggatgagaggatggtatcccagtactttgtggatataaaattctgtccattgccaggacggcttttcattgttttctacaggtggagccctccatggtctggctgcggtctcttgaagcttggctccttccgctccaaaaaaatgatttagtctggatctgcactcaccactttgcttccccatttccaaacctttttttctttccatgaaatcctctaaaacccagccctgtgcatgcagtatttcttcaggaagccttttctgacctctacagcccacaaaatttctcttttttctgaactctcctataacacttaaggtatataataaacaatctgatatttaatttcctctatcttatcctcttaactagattgagggttacttgaaggcatctgtcacagttgagcagagctggacacatgttggcttctcagcactctttgtttattcatttttattacctttttttttttaacctcctgcattatccttgtcatgtcacaggccctagaagaggaaatggcagtaaagaggacagttgctgcctttttgatgtctgttcatttctaagcatgaaggcttttggggattttgatggaagtgctgaatccagtgagcaacatctgtttgtggatgggaaagatcagccggaaagactaaaagggccgaatggtagattttcaaagctgtagggattgacaaaagggtttgagttagtaaaaacccatgtgaagttttaaaagtccttacatatataaattaagcacttctgattcttctagattcctatacaaacaaggtaacacactttcaaatgtgcctgctgtactgtgggcacttttgttatcacatctaattttcacagtaatcctatgaacaccagtcaaaagcagattctagaggcaggtggttacattattattaccattttacctaagaggctcctaagattcagagaggttaaatcacctcctcaaagtcacactgcttaagtggcaaagctaggatttggatctgtatcttctaactaaaaagtcaacatttgttttcatcattccatagctgctttctaccctaattttgtaaaacaaggaaaacctgttgggtattctagcaatgtttgttttatataatgttttattgaataagtggctctctcacacttactgaacttgactatgatcagtgtaacctgctaagtactttatatgcataagcatatgtacttgtagccttataagagccctatgagatagctgctcttgttgtcatgtccattttacagatgaagaaagtgagtcatatgctggtttaaaaacttatccagcatcacacagagctggcatttgaacccaagaccatcagactctggaacctgtgttttgactgctgttttagtcatacacaagacttcgtgggaaaaacaaaacaaaaacaagaagtcctgtggtcagtttaagaagaactgtaggccgggcatggtggctcatgtctgtaatcccagaacttcaggaggccgaggtgggcggatcacctgaggtcaggagttcaagaccagcctgggcaacatggcaaaaccccgtctctactaaaaatacaaacaaaaaacaaaaaaaaacaggcgtggtgatgggtgcctataatcccagctactcaggaggccgaggcatgagaattgcttgaaaccaagagtggaggttgcaatgagctgaaatcacgccactgcactctagcctgggcaacagagctagaatctgtctcaaaaaaaaaaaaaaaagaaaaagaaaagaaaaattataatcacccctgccccgaaaaagacagtacatagtagcatgaagggtctgagaagtcttatgggaaggggaatgttgattttgccccctgagtttcccacatattaaacataacacttaattttgagtttacattctagaaaacactgcttgccatagtggaaggagaatctggacctggcaattagaagagtaaggaagaagaaaatctttaggtcaaaatgaatcccaacactttggaaggttgaagtgggaggatcacttgaggcaaggagtttgagaccagagcaagaccctgtctctaccaaaaaaaaaaattaaccgggcatggtggtacatgcttgtgggcccagctaatcaggaggctgaggcaaaaaagatcatgtgagcccagaaattcgaggctacagtaaacaatgagcatgccattgcattccagcctgggtgacagagtgagaccccaactctttaaaaaaaaaatgcgtaagataaaagagtataagattagaagtcccatttggatgtgagctcaggctcctcctcttattggtaattattgtgttattctgggcaaattatatattcgttttgagtctcccttatctgtgaaatgtggtagttgtgaggaaaagtatgattatatatgcaaaaatgcttagtaaacagtaaagcttgaagttgtttttgaaattgttgtttaccaagtttatttctgtcctagtatgtagcacagcaactaccagctactagaacaattaacagttggaggaatgaatgaagtttgccttctgtgtctctgggttctgtaactggtatgttacaactgaaaaacttttaaaatgagacattattcctcaaattttctttctaaattgtgtttttgctggtttttgtatttttggagttaaaatgaagtcactcaattagaaaatcagaacctatgtttccttcattcactgtattgtaccctggtttggactgttaaggcagtttattatgtgttttttttggcaacaacaaatgttttgcatagttccaagatggtaatttcattcaacagtgtatgtgtttttttttttctttttatatgctgctcactccctcagatggggccatctgttttctcttttttttttttaataggaatttctaatgtaccaccctattgatgtagttactcttactgtttctatgataaagtctagctctaatttattaagaattgtcaggaagagaaatgtgctgccgttttgcataccagtgtggttttcactgatggggagagcgctgagatgtacaggtgcgtcatttaccctctttgagacatttgttttctagcacctggccaaagaaacaagtatcagtttgagattgttccaataggtaagacattgcacaaagattgagaaatttaaaagaaaagacattcaggtcatttttagcacacctatttgtctgctaggatcacattattatttctagaaagatacgtgttttgccagcaactggttagttgggtagaagggagctagcattttctattcaacagtaatctgacctaactacctgtcatgtagtttatgtgggtctaatcccccacctcacctagggggcagcacatgacccagacctggccagaccaagactcaatcccctggctatggtgactggtttaggggcagttttgtcatctaagaattctctatggcaggggtccccaacccctcaggctgaggaccagtaccagttcgtggcctgttaggaaccattccacacagcaggaggtgagcagtggtgagcattactgcctgagctctgcctcctgtcagatcggcagtggcattagattgtcataggaccagaaaccctactgtgaactgtgcatgcaaaggagccaggctgtgctcttcttatgagaatcaaatgcctgatgatctgaggtgggacagttttgtcccaaaaccatcccccgatcccaccccagtccatggaaaaattgccttccttgaaactggtccctactgccaaaaaaagttggggaccgctgctctatgggacttgagctagaactattataaaagatactgtttggtttcttttttctgggatcaagagctgtcaagatcatgaaagcttcaaatcattatttcccatcatgtggggaagactaataagccaagagaaagggaagtagagttcagtaatgacaagagagcaagttctcatggcagccttgaccatgtgcactcaggtatttaacttaagccaggcttacccataaacctttttttttgttttgcagtatataaacaacaaatttcattgttcatgtctgttacttgcagcttaaaaaatcctgaataatgcaaaactgcaagaaaaataaaaaagcagactaaaatgtgtatcattttacctccaaaggagatgaccatcccagtcatcttcaaaattgtcagaccacagctgcagtgttatcttctgtctaggtgtttaacagaggaccgtggcactctagggcactgttacggactaaattatgtctcccacaattcactggttgaagcccctgacctcagtgtgactttattcagagatagggcctttaaggatgtaattaaggttaaattaggtcttaagagtggcccctagtccaataggactgtgagaggaggtgaagacatgagggatgctcatgctcagaggaaaggccctctaaggacacagtgagaaggtggctgtccacaagccaaggagagaggcctccagagaaggcaaacctgccaacaccttcctcttgggcttccaaaactgtgagaaaatacattgctgctgttaagctgcccagtctgtggtattttgttatggcagcctgagctaactaagataggtttttctttcaaaagaaagaaagaagaagaaggtgaggggactcaagaccacatctgaagggcagtccgttgaagagcctggaataaaaggctctggagagacaatcactgtctagtctaatttctccaaggtgtagcatccagatagaaagctacatgacattgattaaaggaatcacttccaggaaagcctttctaacaggggccttctgctcagtgttcaaggcttaccttttcctctttcattcccccaggtagagttaatcttccttctcatatactctgaaaatactcttgcacctacttctgtttctgtacttctcatgcccttttgttaactggatttgtcagtccctgccttctagatgatgcactgtggaaggagcacgtgacattaattccaggcttggctggtgtccagcatgtgtttcaagtcttcagcagtgtttgctaaatgtacaaataaaatatagaatattagaaccaaaaaagttccttaggtatccccttgttcagatctctgtgagtccctcttttggacatggtatttacctttcgcttccccagagcagacatggccagttcccttgaggtatttccagtgggtaagggaaagagaagtaatatttccgaaacagccactatgtcccaggcaatatatagttattttctttcattcattcagagctagacattagggatacaaatgggatagcttccatttatttattcaactattgagggccgagaactgtattaacaatatgtcatttcattaacaccactttcagcaagttagaaattacagaggaggaaacacacctagacagggtcagagcttggttgtgatcaccaggttagttagcaacaggactggaactagctctatggattcccattctgctgcttttcagtgaggggaaagtgtagactaaggaaagctgaaatcatcctgggtaggatactgtagacggagagctgcaggcagcagaaggaagtgcctggcaactagctctgtagatttaataaagcaccacgttggccatgtctatagaattaagaggaaaagaaggaaattaaaatctgaagaagttgtggcaagtggacagaattgctaagcatggacaaagcaaataaatccacagcaggttttaaacaaactgatcttatcatgctcttgtctggacaaacttcccagctctgttgggccttcagaatatttaattctgacttgccatatcaaagagcagaagcgatggactcagatggcggacaaggttgcccaccactgcctcctctcggttttgaagcccacgtggtctggacagccagggctcttagtcccaaatcaggatactgtcttaacaagcggaacaagtctgggtcccatttgcatttcacttgtccctttgtgccattaaacttctttatttttaataagctagttttattaattgaaaaattattaactgctcataataaaaagcttaaacagaataatgctagaacttcactgatatccctcaactcttggcagaggccacagcttgggtgggtagctgtcagagatggtcttaggtaccacttagtaccctgtgtgctgtgccctggggtgtgtgtgtgtgtgtgtgtgtgtgtgtgtgtgttgctgtaaagaaagaatataactttgtactcacaaagatcagaaactagggatacagtttgggttattggttacttttccaacttttttagttctcttgaatatatcctgcctctcccaaaagcagatgaattcctcaagagtggggactgtgtttccttctgcagccatgacccatagggcccaggactggcttctcagatttcagaaaatagagtcattaaccaagtcaccaaataagtataagaactgaagggaaaaaggacaggtaagaacatttgagcttttcaaagttaaaccttggggacagagaccctgtgggagacaaatattttaaaaataggattcctcatatgaataccccatgatttcagcttttctcactttatgaagttcagttattttctagttaaaacaatccttgttagaggccatttatttatttatttgagacggagttgcactcttgttccccatgctggagtgcagtggcacaattttggctcactgcaacttccgcctcccagattcaagtgattctcctgcctcagcctcccaagtagctgggattacaagcatgcaccaccacacctggctaatttttgtatttttggtagagacagggttttgccatgtcggtcaggctggtctcaaagtcctgatctcaagtgatccacccacctcagcctcccaaagtgctgggattacaggcgtgagccactgcacccagttgttagaagcttttaaagcaaaactttaagtcacatgaataatttggacacataatatgggtaaaataactagagttactgaagtgttgaataaaccacatttaagaaatttctaaataaacaacaacagtgaagttctctgtacagtaggggatggtaagtagtttcctagcctggaattggtctatatcttcacccactctgttctctctggcttgtgtgtctgggtggtgtggctgaccccatgagctgctttttgtttttaatagagacagggtctcgctctgttaccgaggttggaatgcagtgacgcgatcatgggtgtcacgacctcctgggttcaagtgatcctctcacctcagcctcctgagaggctgggaccacaagtgcacaccaccacactgggctaattttttaacttttttgcagagatggagtcttgctgtgttgcccaggctgatctcaaactcccgggctcaagggatcctcctgccttgacttctcaaagtgctgggcctacaggcatgagccactgtgcccagcccccatgagctgttgatctttgtggcttctgtccctttgtgtttgcttgtggcacttggacagccttagcaaacggctcaatgcacagtgatcctgttactagcactttgctgcccttactacagatttttaccagctccttttgttccgcttttttctctctcctcctttctttatgcatttttaacattactgtattttttctcttgtgaactcttccttgttcacaatctaccatgtagctcttcccctcgccctgtatcctctcctcagctcagattagcctcccgtctagtctacattcaagctacacgttctctggacttggattagttctttttgtcattgtttccccatgtttttccttttagcatgggagcagagagaaggtagagtgtggctgctcgtctgcccctcagaaagcagccatctgggcaggacagaacggagcctgactgctagtcagcaaacgcagttcaacctgagaaaggaggtcttcctttcctttgcttttatctccccagtctgcaccaaagggtttatatattgaatagtgaggcaccttccctgggatgtgagaccaggaggagaggttttgcctcagtatgtctccgtgtctccatttaactcttcatgacctttattgcctgtgtttttggtctgtaagtagctctgagagctttcataaatcacttagctgttgtatgctgcagtttcatcctctttgaaataagaataataaatgtgggcatggaagagcaaatgaaatagaggatgtaataacataaagttactttgagaaattaatggtagttattagcacattccccctgaaaaagcataatatgcttaagctacaacgtttgtggaggctaaagacactccatttgagatgctaatctgccatgttgaattctgattgaccccaattccgggtcagtcaacactataaattcacagtgatgttatattaataatatattaatacataatatgcagaaatgtgtacttagaaacagtggcattgttgatacaatatggttattgttaacaataagtgttcctcttcccccattccttttaactccaaacctaggaaggcagtcagttttaaaaggaggaagttatgattggcagcatggaaaggaaaagatattgaactttttttcccagaactcctaggtgtaagattatgctctcctgttacaagccatgagatgtgaggtgggcttggatgcctccttttaatacagtaattgtaacatccctgtttacttcacagcatagtttagataattaaatgatacaatgtatcagaaagaacgtgaactgtcctgtggtgcaaatataaaagaaggcagaatgtgggcagaaggagggatggggcaatttcctgtggccaagacctaggtctatgccgcttgctagtcaaatggcctggagccactctctgagcttcagatttctcatatttaaagtggaaatgattgtaataaatgtgaagaccccaacacacagtaggtgctcagtaaatgtcttttaagagattattattagacttatatccttctgaaactgagaagtgatatcagtgcaaaatacatcccagacttcaaagatattttcagttgggtattgccaaatggatttcaccatggacttagaccccataaatgaatgtgtcagttttagtatatttttccaggtattttttggtgaactgttttttatttgtgtgccaatagtaatacccgactagaaaaccctatctgaaagctttacttttgatttctagaagaaaacatttctaaggtgggaatcaattaattggagaacagagaatagtgaatagttgtgcactgatctctgaagccacactgcccagtaaaaacaactcaagccacaaatgggagctgcatgtggaattttaaatatttaataaccatatgaactaaagtaaaaagaatggatcatattaatttaaaaaatatatgtgtttaaactactgtatccataatataatttcaacagtgttactatggtaatatgaaaattattaattaactatattacattacatttttgtactaagtctttgaaatttgggctgtattttaccctaacatcacttctcaatttggaccggccacatttcaagtgctcggtagtcacacatggcttgaggctaccaaaggctaccaaattggatgtctagagccctgatgaactgagacagaaagtaactaagacagagaatctcggttacattgttgcatttagcaaatgggtttaaaagtgccaggccaaatagaatttccagacttacgtgatattctttgctctgtattagatttgcattgatacaggaagtttcaaaatactctctaaattgctcctcatttctctgttactgacaagcgcacagtggagacgctgcctccttaaactcccccatctctgggccctgggcccagcgacctctggccagggtgagcatgccgtgagggtgcttcagtagcattcactgtgcccagggccagttcatatgctttttttggtaggaagatttctttttggagaccaggagttactttgaggaattaatggtagttattagcacattctcctgaaaaagtataatatgcttaagctacaacgtttgtggaggctaaagccactccatttgggatgctaatctgccatgttgaattctgattgaccccagttccgggaatgcctctgagatttctacttttatatactcaccagcattgatgttattgtaaatacatacttaccataaaccctgcccttagtcaagttttctgaggtatataagccctgagtctggtggataacagtgtggggatcgactgtctcaaggccacctgagatatggcttctgtttgtgagtccttattaaatttttccttctgaaaaactggatttgtcaacctcttttttcagcatatcagctccatcaacctttgtgggtaggttcacatagacctgttcaccatggaacaacatggcataaaatttttagggttttatagatcactgaaatccatctgagcacctcaggttaggaacccctctgtattaatcaggattctccagggagtaccaataggagatagatatatatatatgtatgtgtgtgtgtgtatatatatatgtgtgtgtgtatatatatatgtgtgtgtgtatatatatgtgtgtgtgtgtgtgtatatgtatatgtatagatatacaagggaggacttattagaggtattgagtcatgattatggaggttgtaaagtcctacgatagaccgtctgcacgctggagacccagggaagcaagtattgtggctcaatccaagtccaaaggcctgtgagcccagggtgggggtggggtggggtgaggtgctcaggcaagtcctggagcccaaaggctggagagcctggagttctgatgtcccaggggcaggagaagaagtgtcccagctccagaagagagagggaattcacctttcctctgcctttttttttttttttttttcttttagagacagggtctcactctgttgcctaggctggagtacagtggcacaatcatggcacactgtagcctcatgctcctgggctcaagcaatcctcccacctcagcctcccaagtagctgggactacagatgcatgccaccatgcctggctaatttttaaatttttttgtaaagatagagtcttgctgtgttgcccatactggtctagaactcctgggctcaagcgatcttcccacctcagcttcccaaagtgtttcttcccttttgttgtatctgggcccccagttgtatatgtatagatatacaagggaggacttattagaggtattgagtcgtgattatggaggttgtaaagtcctacgatagacccgcccacattgagggtaggtcttccctactcagtccaccaactcttaatgccagtctggaaacaccctcagaggcacacccagaaataacactttacctgctctctaggtattccttaatccggtcaagttgacatctaaaattatcgatcacatcctctttctataatggtttataatagtattacagtgtgcacccattgtgaagcaaaagggggttgggggattcacaacatgtgtgaacctgcgtagcatagttgtgaaatagtatacaagaaactcatgacagtagttgccttgggaggaagctaagatgggaagggagatagtccctatatttttttaatattttaactttcacaacacacagtatttcttatacagagattttggcttacatatacatacaataacaacgagaacaataaacccttaatccagaattacatattaaaactggcaagaagacttcaaccaaaggctataggagagcaaacataatttgaacactttcagtctgccgggcactggggaagacgggtaaggactgatacttgtcctctgagagctcacagcataaagacagacctggaaatagaccattgtaattacaatgtgatccaaggagtgccacaggcagacctggggtatgtgtgggtatctaattcccaggcccagggttcttggagaagaccaagcctaaaccatctccacacatcagctggaagtaacctaagcaggggtggtcctcgctgcctgaatggacagtgagaaacagcatggagtgtttcagcagtgagctccccagtatagcttggatgtaagggttgaagcaggctcactttggtgggagcttggaggggagaccatggggcatccttataccactttcccactggggacagtgcagtgagccgtgattgcaccactgtactccagcatggatgacagagcaagaccctataaaaataaataaagaaataaatactggagcaaaagctaggcatagagacaataaaaggagggagtacctagttacagctagtgtgttgttgaacgctgccagaggggttggtaagcctgatgatgtagttaaggcagccacctcactcccgtctgcagttgggagccactgctttgtagtacaataagggtgacgatacaaatagtgcccactttgtgggattgttttgagtattaaaagagtgtgtgatgttttctggaagctggtgcataactcctactcctgccttaatcctctgttcctggcacctcttcctggtcatctttttaagtttccagagtaatccaagggccctcctgtgctctcacatcccctgctcttgccttgttatcgcacctgccacactttatcagatatctgagtgtcttcttgagggccaggactgcattatgttttacttcctatccgtggtgtttagcatgagcaggtcacgtaataggcgcccaacacatgtttgttaggtgaagaactctctcgtgtaggtcacaatgattttcagtttgcaaagcacttctcatatcctcagtctcatttgatccctgccagcactcagtcaagttgaaaggacgggattaatcttccattttgtcaatgaacacacattcagagaggtagagctaggactgtcagctgtgctgacttctgctgtaccacactacccatttgaggagctattgataaactacagcattattgtttttttaatctctgtcctgccctgggcagatcagtaaagctaaatcagccagtggtgtttgttctccctgggtgtctgtgtttgtgcctaatgggcagaatgaattatggaatgaatcaatgaattcttggaatgttctgaggcctgtgggcactgatgattgtaagtagtcttgacaactttttcctccagccgtgtcctgcatctcatgaaagccaggtttatttccagcctaattagagcagtaggtcacccagaacagctcagagcagaaataaaatcttcagaagagacctgtttgatttgattttcccccattttgtcattggaaaaaaagtgttgaaatttcaaattgtaggattcctttctctgtaaaggcctctgagatagccaaatgataagaaaaactcgggagacagtgcattatacttactgagtcagcatccctaacaaggaaatccaagatactccaatgagcatttccttcgagtgtcatgtcggcattcagaaagttttgaattttgaagtattttgaatttcagatttttggattaaggatactcagcctcacacatacaatgagtatatatgaggcttaggtcattgaagaaggcattgggttatttattctttagcaaacacagtgttgactaagaattttgacaaatagaccaggtgaggtggctcacacctgtaatcccaacactttgggaggcccaggcgggcagatcacttgatctcacgatttcaacaccagcctggctgacatggcgaaaccctctctctaaaaaaaatacaaaaatcagctgcacgtgttggcgcttgcctgtaatcccagctactcgggagtctgaggtgggagggttgcttgagcctgggaggcagaggctgcagtgagccaagatgatgccagcgcactccagcctgggcgacagagcgagaccttcctcccccgcgccgccaaaaaaaaaaaaagaattttgacaaattatggaggcctgggctaaacgtcaggagggttgattttctttttctttctttttttttttttttttgaggaagagtcttgctctgttgcccaggctggagtgcagtggcgcgacctcggctcactgcaacctccgcctcctgggttcacgccattctcctgcctcagcctcccaagtagctgggactacaggtgcctgccaccacgcccagctaatttttttgtatttttagtagagatggggtttcaccatgttagccaggatggtcttgatctcctgacctcatgatccacccgcctcggcctcccaaagtgctgggattacaggcgtgagccaccgcgcccagcaggagggttgatttctaaactcagttttgcagccaatattttgagaccttgggcagatctctcttttttttttttttttttttttttttacctgaccccagtttcttcaggaagccgttaaacctaggacagaaactgtccttgggtttaatctgaaaacaatcagagccctgcaagtcctttgatccagtctcttacctaaagtagacgggcgctatagttaccattggctagatggccaatggcaaaccaaaatagttttcctgtagcttccccctctgaaagcaggaagcatagcctatctatctctggactccctgtacccaagcacagagcctggttctagtcattgggcagaatcgtctccctagggatcacacagaaggatccgttctttccactgagctccgttgcacaggtccagagccagagctcacactctctttccattgctccgggacagacagccctgctttcctcagccagttgtcagatgttatgatttctatttgccttattatcttagttgccgtcaaggaatgcttccaggttggcagtcccttccttatattgtaatatcaaaaactgatctaaatatttcatttgtgtagcctgggttacacattctgcaacctatatcacggaataaaccaggtacccaaccactgttcattattcagattgtgagttagcctggtgtttttacaagttaccctacagagagcttggacacgtgggtagaaagtccagaaataggtcccgacaaaaatgccaagtgatgtttgacaaaggtaaaaagtccgttcagtgagaaagtatagccttttcagcaaatggtactggaacaattggacacccttatgcaaaaagaagtgaattttggcctaatcctcacatgttatacaaaagttacttcaaagtggttcataaatctgaatataaaatctaaaactataaaacttgtggaagaaaacttgagacaatcttcatgacctgggatttagggaagaggttcttagacatgacagcgaaagcaccatccataaaagaaaaaggataaattggacttcatcaaattaaatttcatcaaaaagataaattttgacttcatcagaattaaaaactattattctgtgaaggatacttttataagaatgaaaagacgagagacagacttggagaaaatatttacaaatacaaagggcttgtctttggaatatataaagaactctcaaaacttaactataagaaagtaacccagttttttcaactgggcaaaagacagacacttcaccaaagaggatatacagatggcaaataagcacgagagaagatgcatgacatcattaatcattagagaaatgtaggttaaaattaggatatcatatgcacttactagagtgactaagatgaaatactgacagtgccttgggggtgcagagcagcaactctcctacactgccagaaggaatacaaaatggcacagctactctggaaagcagtttggcagttccttataaagttttacatacagttaacatataacccagcaatcctacatagtcaccctatggaaatgaaagcttacgttcgtgaccattgccaaaaactgtgaacagcccaaatgtcctttgattaaatggataaacaacttgtaatacgtccatacaacagaacactactctgcaaaaaaacaaacaaaaaaaacactaattattaactaacacaacagctcggatgaatctcaaagcattacactgaataaaggaggcctattaagtcataaaatgttacacgttgtatgattctattaacatgacattttcctaaagacaaaactgttgagatggagaacagatcagtggttgctgggaattggtgggggcggatatgactacaaagggagagctgagggagcttgggagtgatggcactcttctgccttctgattgtggtggtggttacaccaccaatctacgtaggtgttacattcatggaaatgaaataaaagcaaaaccaaaccaagcaaaaaggtctgagaaacaaaaactccagtaatttaagtggtgaagtagttttgcattattatgttcctttggatttatttgatttgtaattaaccaaatctagctaatgtgtcctatttttctttaaatgttccttaaaaccattggaaatcattgataggaagcagaaggtttggaaacatatagcttgggaaataaacagttctcaggtcaagttcataggcttgcctcaaagcgtgtgagtgtagttcaagttcaaggaattgcctggaagccaaagagcacatgtactgcaactgtgtattctagggaggccttttttgtcagcagcgcccttgcttcattttatgtcattgtgctctctggacagctgaaataacttgagaattatcaccctggatgcagtcctttatactgagtattgtttctgatgtgagtcagaatgtgggatggttttcttcaacagtctcaaaattctcctgttacttcataacccagttggaagcatttatattttcagtctgcatttggggcatttttaaacaatatctttattgagatataatatacataccataaaatccaccctttgaaagtatacaactcagttgtttttagtatattcactgagttttgcaaccatcaccacaattaattttagaacatttttatcaccccaaaagtagattctacccattagcagtcagtcctcagtctcccccagcctctcctcaccagccctaggcaaccccaatctacttttttctctatggatttgccccttttggattttatatcgtatacatggaatcagacaatatgtgacctttgtgactgacttctttcacgtagcctaatgttcccaaggttcatccatgttatggcatgtttgcatcactttctgagacattaagttgcacacattttctggcccctttacaaagcaggatttacgttagtcgatcctcgctcaaggggacacagatataaaggaagcaacagtggactgccataaataagaattgtaaatccaacaactcccaccccgtaaaaacatttttttccagtgttaacagtggttgtctttggggaagaaaggagcggggaaaggagaggagctttaattaaccttatgtatcttccttgtactttgagttttctgtctttaaacatatataactttaaaagaaatgtcaacaggaggtatctcaatggggagctaacgtgtccttgcttttttaaaaatttgtgtatttcatttatttatttatttattttttttttttagacagtctcactctgtcgcccaggctggagtgcagtggcgcgatctcggctcactgccaactccacctcctgggttcacgccattctcctgcctcagtcttccgagtagctgggagtacaggtgcccgccatcgcacccagctaatttattgtatttttagtagagacggggtttcaccgtggtctcgatctcctgacctcgtgatccacccgcctcagcctcccaaagtgctgggattacaggtgtgagccaccgcgcctggccaaaaatttgtgtatttttaaaaatatttaataattcatatttttaaaatctttgccacaattgtttatttctctccataatgctatattacttgtgtatgagctcatgattttttttttttttttgagattgggtctcactctgtcccccaggctgaagtgaaatagtaagatcatagctcactgcagcttcaacctcccaggctcaagcagtcctcccgcctcagcctcctaagtagctaggactacaggcagacaccagcacgcccagctaattaaaaaaaaaaaaaaattaagagatgggggtcttactgtgttgcccaggctggtctcgaactcctgcctcaagtgatccacccgcctcagcctcccaaagttctgggattacaggtgtgaaccactgcacccagccttattatttttactagcatacagtagttccccctgcctaatccacggttttgcttttcactgtttcagttacctgaggtcaactttgttccagaaaaattcaatggcaaattctagaaataatttgtaaattttaaattgtaggccattctgagtagcatgatgaaaccttgcgctgtcctgctccgtcctgactagacatgaaccatctgtttgtccagcctgtccatgctgtccacgctacctgcttgtcagtcacttggcagctgtctcagttatcagatctactcttgcttatgatgtatacatagggttcagtactgtcatggtccaggcatccactgggggccttggaacatatccccccatggatgaaggtgacttctgtataatattcttctggtttcttaatctcttttccttcttaaattctatttgtctgatattaaaattgctaacttgattttctttttacttataacagcattataacttttccatttctttattttcagtcttgaagcattcattggttttagctatcttgtgtggactgcgtacctctggttcttgttttttattcaatctaacaattcctgtctcttggccagtaattgtaacttgtttatggtatggtcattactattgcattagcacagcagtcttcaaactggggcatgtttattcctgggggtacataaagacttcctggggataaattggcgagggagccagttccctggtttctaacttccgtgtatattccaggccaatgtcgatctgttaggaaatgtgtctgtgtgctgctgctcctttctcccatcagctttcatggcttctcctcttactgtacagaagaaaggcatatcactgaccccttccacattttacgatcttccttaccttacctcaggacataatacctcggtggaccaaacagaaatagtttgaaaactcgttggccctaaaggagagtctcataaaagcaaagcaaagaaggtctctgtaaaaaataacggaagggcaggtcttttttcttccaggctaccaactcatggtgcatccccatgccttacctatctggtagttggttttaaaactaagaatcccgaagtgctatgctttcactgtgatgtgtatagcatgtttgagttgaaaataaggtcaaactttttctgacagaaagtaaatctgattcgcctgaatgtttgacagagcagacaggctttgccaattatgttctatgtcagaccttctttgtaaattctgaaagagcttacacttacatattaaattgcatttataaatttaatatattgaatgcatgcatgccatatataatgtttctaaatattacatcttttcgcaaccatttaaatttaccttgaaaaattgtagatgtcaccttaaaaatatgcaggaggggccaggcacggtgtctcatgcctgtaatcccagtactttgggaggccaaggcaggaggattgcttgagcccaggaggtcaagaccagcctgggcaacatggtgaaaccctgtctctacccaaaaatacaaaaattagccaggcatggtggtgtgcacctgtagccccagctacttgggaggctgaggtaggagaatctcttgaacccaggaggcagaggttgcagtgagcagagattgcaccattgcactccagcctgggcaacagcaggagaccgtgtctcaaaaaaaaaaaaaatgcaagatacataggttttctaaatacttttagaaggtatgtgtattagtctgcttgggctgctgtagcaaaataccatagactaggtggtttaaacaagacatttattttctcacagttctggaggctgggaagtccgagatcaagatgccaggcagttcagtttctggcaagggccctcttcctggcttgcagatggccaccttcttgcagtgcactcacctggcagagagagagagtgcacatgagagcatgcacatgtctggcatctcttcatataaaaacactaatcctgtcaatcagggccctacccttaggagctcatttaaccttaattgactttctgcaggccctgtctctagttatagtcacattgagggttagggcttcaacatatgaattttgggggccacagtcagtccatagcagtacacaagcaaaagaaagattaacataataatagcttttaattctgctgtcttattctatattttctattttttatgctttttctccttgttttttctcatttcgccttctaatggatatattatatttcttcagttggttggaaaactataggttctatttttattctcctcatggctactcctcccttagtgtgacccatgcttatacgtatttttctttatcgtcgttttaaaatttgtcagtgtctgcagcttccttcagtctttaatatactcttactgccttctgttcttcatagagtaacaccctatacgtatacaaaagttgttgtgtctggaatttttgagcaaagttatggatattttatttaaaaatagtcattgattatcattgattactcaaacatcattaaaccttaggcaataagaaactttatgagatttttgttttaatgtgaatgtactaaacaccactgaattgcacactgtaaaactgtgactttgtaaccaccatctttatctagtttttatatatttttattacccaggttcaagctattcccccacctcagcctcctgagtagctgggactataggcacatgctactgcacccagctaatttttgtattttttggtaaagacagggtttcaccatgttgcccaggctggtctcaaactcctgggctcaagcaatcctgcctcagcctcccaaagtgttgagaatacaggcgtgagccactgtgcccagcccctcttgcatagttctttttatcacaaaaggaagttccgtattaattagtctcttccctcactctgtatcaatcatattttttgcattttattatttttggactttttttttttttttttttttttgagacagaatctcactctgttgccaggctggagtgcagtggcgtgatcccagatcaccgcaacatctgcctcccaggttcaagcgattctcctgcctcagcctcccaagtagctgggattataggcacgcgccaccacacccagctaatttttgtatttttagcagagatggggtttcaccatgttggccaggatggtctcgatcttctgacctcatgatctgcccactttggcctcccaaagtgctgggaatacaggcgtgagccagcgtgcccggctgacgttttgacatctttacgcggccatgttggctggggaagagactgcccctcccagggttagctaattcctagagacagtaagaagcttttgttggtgaatctgtctttcgtatacaaaccaaccaattctgagtccataccccagccacttcctttatctgatgcgcacacaccaagccaatatttcccctgctctaaatcaacccagaaccaggtcccagacaactagggacacctcctaggccccaaagcctgctagaattattcaggtatagctttttctaagccatttatcgtgcctgccttgccttctctgtggaagccccagtaagggctgtggcctgtgccttcccctggctcctgtccccttattgactctggtgcttcccccgtggccctgcatgttgtgctgtgcctcttattttgtgggggaactgtgaatgacattaaacttttctttcaatggcactgacctctttgtgtcattctcagtgacctttataaattaacacccaggcacacatcccctgtcaaccagcctgtgacaaccactaatctgtgtcctggccgggcatggtggctcatgtctgtaatcccagcactttgggaggccaaggtgggcagatcacctgaggtcaggagtcaagaccagcctgaccaaaatggtgaaaccccgtctctactgaaaatacgaattagctgggcattgtggtgcatgcctgtaatcctagctacttgggaggccgaggcaggagaattgcttgaacctgggagggggaggttgccgtgagctgagatcgcaccattgcactccagcctgggcgacaagggtgagactccttaaaaaaaaaaaaaaaaatctgtgtcctctctctttaaatctgcctattctgagtatcatataaatgtaatcatataatatgtggcctttcgtgtcttgcctttttctctgcgcataatgttttctaagttctgtctattgtaccatgtgtcagtacctcattccctcttcatggcttaaaagtattcagttggatgctcccacttgccataccctgctatttattcctaggagcaaattttctttttgctagaatatatacagtaacatttttccaaagaaggtctgtatctggaaaactttctgaaatcttgtatacctaaaaatatatttctttcttccttacatgtatatgatagtttagattggtatagactgaaaagtaaggttcaaaaatttgttttctccagcattctgaagataatatctcattgttttaccctagctgaggtgtagaagtctggtctgatttttgttcctttgtaggtgacttggttttatgtggaaagcttttagaattgtctgtctctgctgtacttagatatcgtaatcagtgtttgtgtctgtatgtgtgcatgtgcacacttacgttgttgtcttttttcttttttctttttctttttctttttcttttggagacggagtcttgctctgtcaccagactggagtgcaatggctcgatctcggctcaccacaacctctgcctcctgggttcaagccattctcctgtctcagcatcccgagtagctgggattacaggtgcatgccaccacaccctgctaatttttgtatttttagtagagacaaggtttcaccatgttggccgggctggtctcgaactcctgacctcacgatccgcccacctcggcctcccaaagtgctgggattacaggcgtgagccaccgcgcctggcccacgttgttttcgtatcagttctgtttggaacgctgttgaccctttcagtcttgagctcttacatctttcttgaattctataaaattatctgtcatttcatcttttttttaattttttttttgcttctgagatgccttttacttctgtagtccctgtccctttttccctacctgatgtttttgggtcaactctttgaccctattctaagtttctcatctttgcctcttctgctgagcatacttactgagttctctatttcagcaattatatttttatactaaaaaaaaaattgcttggttgttcttccttatggcttactctcacttaatgttttaagtatcttcccttgtgtctccaaagacatttattatacctattggatttttaaattctgtttcccatggtagaggttgcttcatttgttatctgtcttttaagtttttcttttatgctacttgcatttctcagagatgttataatttcctcctggaaattagtaatgatgtccgtagaatattcagttgccttggctagcacatgtggtctacttctgctgcggatgagtttaaccaggagtgtggttggaagggagtacctcagggcagggtggcctgatattggaggctagactcagcaaactctaagcttgaaaaaacgaggccctatctgtccccttttcatatcactagtaatttgtgcacttcttgagtcccagtcctttcaggcaaaatagcttaacaaagattctgaacacacaccatgtaccaagaattgggctgcccacaattgattataaaagatgaataaaaaatgatagtcccttcctaaagggtaatgctctgtgaccactaaatagataaaatttcaaaatacagaagtagcacagcagcaggaataattttctctatcctgggggctcagtaaacacttcattaaagaagatacaggcaaattggatcttgaaggacaaacccaagtttgcctgtagatggggtaagaggttgtttcaggaggtgaggacaactgtgtttacaaggcacaggagcctgaaccaccagggcatgtgctagaaactagatttcccactcccaggagtccagtggtgggatttttacctttcccctttacttctccctttatatgatgaaagatgtatatggagaaagattatatgtagcatagtgtcctcatgaacaccaagtccacggaagtctaaggtcacagatatcggtgaagagccatattacagtccccctaagagactgctcagctgacatcggggtttctttatttggccattcacactttctttccagatgctgtaactctggaaataaaacattttctgaggacaagtctcagatcatcagaaaaatgatttggagtttgttttttttttaatctgagtttgttgttcttcatgtcttccctctggtataagaaacagttggacttcacagagcaggcaggcttaggcaggccctatcagcaagagctggaactgaactgtgagtgaactggaaaggaaaaggcaacttttagcgtcttgtggctggctgagctattttagtgtaaactttttaaagaaatgtctctcaggcaaagtggttgagaataccagaatctctggcagatccaatttccattttggtttttggagccatagttgaggttctaggagtcaaataatgatagcacatataaaatattatatttaaaaagcctaatgcagcattgttaataggatttcataatgtgttagagactgtaactaattttgggtagccatttctctgtcctccttttctctactcccaggacacaagggctttgtactcaaaacaccctgccttcttaacacaaattctcatgaaatgtcattattatacaaacataattcatttcttgttagtgaaagaccctttcattcacaaacatcccaatgagaaagaaagagaagtgaggttagtctgtttacagaaaagaaaactaaaatccacagaagaaagttgactttcccaagtcaccacagcaagtttttgaactagatctcctaagtagagtgtcttctagtatagctctgtgatttattttcagcccactctgccttctcttggagtctggacacatggaaagcacatcttttaattcaagtcaacacagttgttgtttattgagcatttactgttttcaaaatccaaagccaaatgccttaggatttaatatcagtatcctgtgtgagtgttgatgcccgtcttcctcattcattcattcattcatgtattcatctatgcatagttattcatatgatcaccacttacactgtacctactacctaagcagtataccaggtgctgagcgcaattcatggtatcacattataagatgctacctcaaacaggatacgtttcttaacttgctcactaaattgcttcacaagtgccaacagttcctattctatctttccaacattttctattgccctgacatgaacgatttaggaattggtaccactcctgcagtacatggttatttataagatcattttttttttcatcggacctggagacaccagggtcaaagtagagacctgaatgcccaggaacatacagcatgtcaataacaaagcaagggttggaatccctatctcatagcaccctactcagaaagcttgccacattttttgcttcttttcataattcttctcaagtgcttcattaaagctagatgatagagttaaaatagtactctattttatctacgtacgtgtaattggagtgccaaaaggttcactcttacctgttacctacctagtgaaactgataaaagacagtagtaacgtgtgaaggacagaggaaatgaggggtgaaactgaaaggcacttctcacagaaaagatgtttactcttaggctagcatcttcagaaaatgaaaaagaataccctttggtagtttaataatcatatttgacttctgcctctggccatggcagaataatggtaatgacttgctctcttgacaaaagcaactatgaaactgtgtaaaatatgtgaagcaactgaatatacaaagggtactgagactcatagaagatattaaatccctgccattttcagacattggacagataagataggactttgattcttgagagaagaaacaccatgagaagcccctggctttctgcctgcagtcactatctagtcttggcatggagtggtggagcccaaatggaaaggtgattttagtcagctcagtgggcagaaattagaattctacgccactgaaatagttggactttgcagggcaaggaactagagaaatggaagccctgtgacagggcaaagacagcagagttctgtgtaaggattctatttggattgttggctgagggctgggtgtgcatgtacagagtgagattcttcatgaggcctggcagagatcgcctgctgtagggctgagagctgaatgatgatgccagaggtcattcagttctgggagatgttgcagatccggcttaacctgaatgaagaaaccgcccagaacacctcaggcattcagttgagatcccagaactgtcacactttaggagtaggactgtgctcttgagtcagatgggggggtggttgcagaggagggggataccctagggctaagttcaaaatggaaatagaactgaagaaaggtttgaaccaagcttggtagcaccaaaaggatctgccagtaatttccctgactaccagaacagacttcacatctttaaagaaagatagcataatccagactttctgcaatgtatcatacagtatctaacatacaatcataagttagtagacatatagagtcagaaaatatgacatatacttaaggggaaaaaagcagtcagtagaccctgaaatgctcctgaagttgaaacgagcaggcaagttcttcaaattacccataataaatatgttcacagactttaagtaaaaggtggataaagtgaacaaacaggaaatcccaaaggagaaatggaaattataaaaaacttgcccagtgccgggcgcggtggctcacgcctgtaatcccagcactttgggaggccgaggcgggcggatcacgaggtcaggagatcgagaccatcctggctaacacagtgaaaccccgtctctactaaaaaatacaaaaaattagccgggcgtggtggcgggcgcctgtagtcccagttacgtgggaggctgaggcaggagaatggcgtgaacccgggaggcggagcttgcagtgagccgagatcgcgccactgcactccagcctgggcgacagagcgagactccgtctcaaaaaaaaaaaaaaaaaacttgcccagtgaaaattctactactggaaatgaaatgaaaaatttactggatgagactaaaagtggatcagagatccagaagaaagggtagtggacttggagacagatcaatagatatctaatctgaaaaatgggaaaatattttaaaaagaattaccagtgccttgtgataatatcaggaggtctacatacgtgtaattggagtgccagaggaagaggagaaagagaatgaggcagaagaaaaataattgaggaaataatgaccagaatttcccaaatttggtgaaaagccttaaattacatacctaagaatctcagtgaaaccctagcaaaatgaatgcaaaaagaaccacacctaaacccatcaaagtcacactgctgaaaacgaaagaaaaagaaaatattaaaaatgaccaaaggaaaagggatccattgcatacattatatgtgaatgatggctgacttctcagaaaccatggaggccagaagacaatgaaacaatacctttaaagtgctgaaagacaaaaaaaaaaaaaaaacctcagtattctctattcacaaaaagtgctttgaagcttgaagacaaagatgtttttcagataaaagaaaactaagagaatgtattgccaacttacctgttgtacagaaaatcctaaaggaggccaggcatggtggctcacgcctgtaatcccagccctttcggaggctgaggtggacggatcccttgagaccaggagtttgagaccagccagggcaacatgttgaaacccttctctacaaaaaatacaaaaattacaaaatacaaaaaatacaaaaatacaccagacatggtggcacatgtccttagtcccagctactcagaaggctgaggcaggaggatcatttgagcctgggaggcagaggttgcagtgagctgagatcacccagcttgggtgacagagcaagaccctgtctcaaaaaaaaaaaaaaaaaaaaaaaaaagaaatgctaaaggaagttcctcaggctgccaaaaaaaaaaaaaaaaaaaagataccaggaaattcaagtgctcggggatggataaagattaccagaaaagagaaatatatgagtaaacctaaagacttttatttcttcaatacacgcacacacgcacatgacttgaacaatcccggggttagggtactggcccctcgaacagttgaaaatccacctaaacttttgcatcccccaaaattttagctattaagagcctgttgttgacaggaagccctaccaataacataagcagttggttaatacatactttgtatattatgtgtattatacactgtattcttataattaagctagagaaaaaattttattaaaatcataggtgaaaatatgttttcattagtttcactagtcattaattggaaatggattatcttaaagttcttcatccttgtcatcttcacattgaataggctgaggagcaagaggaaaaggaggggttggtcttgctgtctcggggtggcagaggtaaaagaaattccatgtgcaagtggacctgggtcaggcatggtggtagctcatgcctgtagtcctagcactttgggaggctgagatgggaggattgcttgagcccaggaagttgaggctgcagtgagctgtaatcataccactgtacgccggcctacgcaacagagtgagaccacatctcaaaaaaagaaatagtagtataatggacctgtgaaggtcaaacctgtgctgttcaagagtcagctgtgtgtatatatatatatatgtatatatatatatgactgtccaaaacaaaaatatgtaacattgtattttgagtaacatatgacagctacaccataaaggatgggaatggagaatgaaattatgcaattatgaagttcttaacattttactgaagtggtacaatattaactctaagtgtaccctacaaagttaagaatgtatattgtaatccctagaaagacctctaaaaaaaaaagaggtatagctaaaaagtcaatagagaaattcaaatggaattctgaaaagtatttagtttacccacaagaatacaggaaacgaagaacagaggaaccagaaacagatgagacaaacagaaaacaaatagcaaagtagtagacctgtatccatctacatcaataaactaaatgtaaatagactaaataccccaattaaaagatagaaattgtcagactgggtgaaaatgcaagactcagtcatacactacctataggacatactttaaatacaaagatacaaatcgactgaaagtgaaaggatgggtagtaggcagagtaatgccatcaccccgccgtaatccctagaacctgtgactgtgtgactttacatgggatgggcatggtgactcatgcctgtaatcctagcactttgggggccaaggcaggaggatcacttgaggccaggagtttgagatcagcctcggaaacatagcaagaccccatctctatttaaaaaactgttttcaaattagccaggcatgatggtgtgtgcctatagtcctaactactcgggaagctgaggtaaggaggatcacttgagccaggagtttgaggctgcagtgaactatgatcacaccactgcatttcagcctgggtgacagcaagagaccctgcctctaaaaaagtaaataaataaaatgttaccttacatggcaaaaaggactctgcagacgtgattaaagttgtggaccttgagatggagcggttatcttggattatccattgggtccagtctaatcacacgagtccttaaaagtagagaacctgtccacaccgcggtcagaaagagatgtcactgtggaagaagggtcggagcactgctgcgtgctttgaaagtggacagaggggctatgagaaagcaatgcagtcagtgtccagaagctgagagaggtgagcaagagagacctatgtggaacttctgatgatgttgggcttctgacctcctatcatcttacaaaactctaagataataagtgtgtgttgttataagccactcagtttgtggtaatttgttacagcagccgcagaaaaccaatgctgcatggaaaaatgtacctaacaagagcttcaagaaatagtgacagaattaaagagggaaatccacagtcacagttgaagatttcaggacctttccctcagcagttgatagaataattagacaaaaacaaacaacagcaacaaaaagtaacaaggacgtagacgttctgaacaatactattaaccaccatgacctaattgacattctagaacactgcacccgaccagtttcagaatacacattctttccttgtgcatatgctacatccgccaaggtagactgcatgctgggccataacgcacattttgataaatgtgaaaggattgagatcataccaggaaaaacaaaggaagaagtcacaccaaatatgttctctggccccagtagaattaaattggaaataggtagcaacagatataggaaaacaccaaatatttcaaaatttaacgaagcacttatcaataatccatggataaaagaagaaatcactagagaaaattaaaaatattttgaaccaaaagaaaaaagaaaactgcaatacatccaaactgtggtttgcaactaaaacagtgcttaaagggaaatgtatatcattaaaagccttttaaaatgcatttttagcattcaaagtgcattcatctctccaattagaactgatacttcttttgtactgtactctgtacagctgtttttcactatatcaataatttaatggatctattaaatatttgctaacattatcaacctcttcttttctaaaccataaaagttctttaaggacaagtacagtcgttctcaattttttgtctgtgatttctaacacagtgcatgcttcttagtgagttctcagtagattttgaaagaaagattggactggatcttatcttcatgagaaccctgtggagataggcaaaataagtataaccccattttacagttgaggccacccacttaataaacaagtgacaaagccaagtttccagtattcctcaagtgttttcctttcaggctctaaattgctgacttaaatgtcatcattagagagagttgtctcctcggtagaagtacaaattttgttccagagtcaaatatgaagacttgatcagtggcctggcgcggtggctcacgcctgtaatttcagcactttgggaggccaaggcaggtggatcacctgaggtcgggagttcgtgaccagcctgaccaacatggagaaaccccgtctctactaaaaatacaaaattagctgggcatggtggcacatgcctataatcccagctactcaggaggctgaggcaggagaatcgcttgaacccaggaagctgtggtggcggtgagccaagatcgtgccattgcactccagcctgggtgacaggagtgtgaaactctgtctcaaaaaagaaaaaaagacttgatcagcttatagcctttatcatctagtcttctattctctggagagtcagtggggactcttccgagttcttgtagccttttcttaaggcctataggaagtcatctgtgctgagcctgcactttctataacagatggaaaactgaagcccagacatcttaagtggcattgacttagacagactatagagttagttagtggggggccagcaccatgacctgtcccctacctccagcaggcttcacccacccttgcacccttgcaggaagcacttagaggcttgaggttgccagctgtggggggttgggcctgtgcagtgcctctcagccgcccacgctggtggggctctgcagtgttagcttcttgtttctctattttctacctaggtttcagtttttcacttgggtttgtttcccctttgtctctggttcagcttccttttcctgtttggttttaagtaggctataaaaatcaagttgctgtcttcagagggtctgtggtcctctgatcaacataggctggtgggagtacaggactcgcctcctcagggttccctgtgctgccacttttcagccatggccacaaggtgagtattggaaccagtgcaggggacagagggatgtcaagaggaaacctagaatcttaacggtgaatgggctgtagaaattatctcaggtccccttagtatactgatcgagaagtccatgaccagagggcagggggcttacatgaggttacacagcaggttagtgacagtctgctccctctctagccgctggtctttccattacacaggcctgtgtctcttgatgcctgtgacctttaatggcttctgagtcaaggacttacttagaaattagcacctgcctctcattatagggaggagggtctgagccatctaggggaattgttgtttagctcagaggtacatttggtgagtcctggcccttctctctagaatgacccgagactggttgttttttctaaatataggcagagagggttctttttatgataggaacttcatgaacttaatagcaagagtcctgaccctccacttgagagacttgtggacttaggctattgctgttgagcacatgtgtgaataccagccagtctacaaaccgcactcctcattgagattgttctctctaaaggtgagattacattttggacctgcctctcccctgccctacaactctgaaagatcatagatgataggacagacagacttttatcctgtggggtttggggcatttgtttgattgactcatgacagctttgttttttagcataaagtaacaatccctcactttgaaaattatttcacaatttccaaagtgccatttcgccagttttcttatttgaatcttttaaccgtgttagattgatgagaacgctgtcatcactcctgtttcgtagctgagaaaacctctgaaaagttgtggggtttgtccaaggtcacatggcaggttggggaaggaatggaaccagggtttaacgaggttggcctcatccggtggttttcgcagcacgctacacaggcgcagaagcagcttgcagtgagttgttaaaattgacgtggtgataggtagaacttgtccagggctgcttattttccagttggctttatttctgatcctgtcattttagtaactttcctttaactttagaggactcgtgagtggagctttagaaaacagaatgcttttcatttcaaaggcatatcaacttccaaagtcattttcagttgtaaattacattgtgaaaacttctagcagcttattctaccgtgtcaattactaattgcagaaaattatatcaaaagtaaatgaggcacagcaatttctttttcaattttaaaatcgtagaaatcctagaaatttccatcttgaaaagaccttggaggtgatctacagtagataagatgttttgggcatcttattctccacttcagccaaaataactctgcttttatgttttctatgtattccttgataattcattgagaaaaaacagtcattgttggtggtggtgatgactttcaagtctgaagattacactaatctagtccagctcttgagtgcgcagatcaggaaattgaggcccagtgtggagcagaatttgtgtacggggagcagagtagtggctgaaccaaagcaaaagcccaggttttctggtgcgtccctcccccgtacaaggctgcttgcactctgccacaggtccctggcctggcaccatagtgacagtcctggtggaagcagcgttcgtggagctgcaaggtcagcagccataggagctgtgaacttttcgtttttcctcatgctgactgacacatggggataccgtggcgcctgtggtggggatacaaaggaccttttaaatgtgaaaatatatcttaccagctctagctctggctacccaccaatcaagaaacagtttccaagccctgactggattaggagctgggaattctcttgagtgcatgacaacatacagaatgctttcactgacgttatttaattatcgcaataatcctgaaggtagtgttgtggggcgtttttgtttttgtattttttagagatgaggtcttgctttattgcccaggctggcctcaaactcccgggctcgagcaagcctcctgcctcagcgggactacaggtgtgggccaccacacccagctagcattgtttttattgtttctgtttcacaggagagagtaacttgacaagagacatagccagtgagtgatagacccaggacttgaacctgtgcctcctgaccacagatgctttgcccttttgctcttacgcctgaattagagctgcctctgtcctcagggactggtagggagtgaggaagacagcactcacagaaatgaggaggcgactggctgtgaggaccctgcagcacagagagtaataagcatagacaggaggggcagtaagagttgagaagttggggactgtcagggaagacctcaaagagaaagtgggatctcaggtgaactttgaagaatagggatgattttttagaaggcactggcaggcatcacaggcaaccagtcacccagcggctgctctgggtgctagggacacagtggtaaacaagacaggcagtcttgtcctcaaactgagggcagagtcgggaggcagaatatagtcaagaaaccatcaacaagagacgtgaaaacaatagagcagtgtggtagagagtgactgggccacgccttaggggacatgtggggacatgaggcagccatgctaaaatctgaaggttttggggtggaaagggcagcaagtatcctcagctggggacgaggccctgagataggaatggtttggtgggttcaagggtcaagaaaaatacagaggctggagcaacatgaagaaggaagagtgaaggcaaataagggcacagaaggctttatcaggcccaacggcaaagcctgcgagctgtgctgaatttagcgcgtatgtcagaatttagttaggggaagcctttggagggagggtttgaagcaaagggaaagacatctcatagaagcttaagaaaatcactctgggccctgtgtggataatggctggcagtgtggcaagaatggaggcaggatgacctcttgggaggctaccgcagtcatccaggtaagaggtgagggtggtttgggccagcagtggagcagtcagggtaggcggcgagaagtcaccagattcaggaagtgccgtggtgctgtagcctccaggactatctggtggatcacacatgggcgtgggggaaacatgagtcagacatggcttaggtgggtggtgattcctttcaccacgctggggcagctggggtgctagctggaagaatctgtagaggtgtgggcctagcagcacaggttcccaggaaatgtgggttgaacaaggctgacctgagcaggaagtagctgaggtcgcggtgcagcagcaggaaacgtgatatggatgtgtgatatgtctgccacttttggggccagccagttaatttcgtttccttccctggtctctctgttgtctttggtaggctgtgggtttttccgaagcacgtactatcttctaacatattatagaacttacttgttctactgtatactgtctttacccctcaagaatgtaaactcccagaaggcagggattttcgcctattttgttcagtggtgtatctccagtgcctaaaacattgcctggcaatacacatttattgaactgctggatttaattaactactttgatatatggtcctaaagattcctgtgctaccaaagttgctactcagtggagcttcctggtgtggcatgttagagaagagaccagaaaaacagacatttcacttgctgtcaggtagtgaaggagctgtggctgcttgggcacagtcattactgtttattccactgtgctgcacatcttgaagctgtaaagatataagaagtctcgcacagccggggttcagcttacaatccttcgcacctaattgtacgcctttgtgtgagggtttggaggagtctccaggaacacctggtgtttcctttctcacaggtatttccagtcctcacgggcaagtcagagagtcccagaggcaattgaacaagccctcagagatcacgtagtccgttcactctccatgggaacccgcacttccctagagacctgtagccaaatcatttggagagcttctgaagcttctctgccttcctctgtctcaaagaatcccatgtgcctctagttgagaaacattcctctggagattctaggttattctcatgagaatgttacgatactcaggtgggctggggcagaaaatggatgagaactagtatagtccaatggctttgctttggtaactgaacccacagaggaggaaaataacaacagctcagcttttctcagtgttatacaccaaccattacgctagttacatgatatacatactatttaattctcatcctttgaggtctggtatcactattgccactttacagataagaaaacaagggttggccgggtatggtggctcactcctgtaatcccaacactttgagaggccaacgcaggtagatcacctgagctgaggagttcaagaccagcctaggcatcatagtaagacctcctctcttaaaaaaaaaaaaaaaaagaaagaaagaaaataaaattaaaaaatgaaaattagccagatgtgatagtgcatgcctgaagcctatagtcccaacttctcaggaggctgaggtgggaggattgcttgagcccagcagttcaagcctgcagtgagctgtgattaccctactgcactccaccctggtgacagagcaagaccctacctcaaaaagaaaagaaaacaagggcctacaaagtatcgtattccaggtcacattgttgtcacttgacggagcttttgatctctgagaggatcaaaatctgccctctcagctttaacttctcaaagctaaacttgtcccaatttgcagagtcaagggtagaatcgaggccctcctgatctctattttgcagtctccgtcattctgtgctgttaataccacaagagacaaaagagacctcgtctgtcctgtagcaccccgtgcctgcgtgcgtatctcttgtcgatgctctgtcggctcaggatctctcctaccagcctagagctctttcagagcaggacgcttgtgttatgcattcatgtttgtccctgtgcctagtaaatagcacagagtccaagtggctacttgtgtcttcaggggtgtttgtaagggcagagccggggtcttcattcccaggctgttgattcatccttggagctgaacatactgtcccaatccttggcccaagccaggcctctacagttgtcccaaggctgtgctaaaacctgttccacttcacaagtgatcagagtcacagactctggggacacaaattttgagatgaagacacagagcaaaatatataaatgtttttgaggtttgagtagccttaacgtccacgtggctgtcagatggctccccaaagaaagggctacgccggtggccttgaaagagtatgggagatgcatatgagacagggtcagtctaggaatgtcagactcccccaacagttggttggagtgtttttccagattgcaccagacttcacagagtaatggagaccagctgtccaggcatctgagagggtgacatccaaggagaaaaggcaaacgtcttgattgcccatgatgtgggcaaccaatttggatagaaaagaaggtgtcagggtttaacactgaatgtagactttatttacccaaagcctttctttaattctaacactctcaaaaatggggctcagtcaccatttgggtttcccatgttaatatgcagagagctaattcattgtctttcattgctgtaatgcagcagttctcaaaatgtactccagagattgaccctcctaggagtctgtagatcagaactgtatttataatattactaagacatcatttgccatttcagctcttgtctcatgaattcatggtggaattttccagagctatgtgatgttttgacatcatcactgtggcagctaatgaaatgtctgcttgtatattcttgtgttttaaaaaattattagttttaatttcaaataaggtgaatatggatagacttaacctacataaaacagaagctttttggcatcctcaataattgagtgtaaaggggttctcttgaccaaaaaagtttgagaactatgtgtgtaaaatagtcagttgtatggctgcactacagacagcaagcatggaattgaaaataccacctgcaaggtggcggttccccctggtagagaggaggggctctgggtctgggaggaggatgcaggcgtcacttgaactaaacagctttatgacttgctgtcagatttcctagactgtgtggtgggatcgtgggaacctacttctcacaggcctgaaatacttcacaataaacattttaagtctacttcatagcatgaaacctgtttcacacctgtgcccattaagaaaaaaaaatggcaccctataaatgatttaataattactaaggggaaaatatagctttccattggagatctggcagtcacctcttaaccaacctacagtctacattcagttggcctgaattcttcacacacacaacatctttatcaatgaaaaatttttaaatagtttcacatcctagcttagcttgaaagggagtaagcagacggctcgatcaaatgtaatccatgagcagatcctacatcccaaaaaatcagaaacattttgtaaaaattgggtaacttttttgttgttgttgcatcggagtctccctctgtcgctcaggctggagtgcattggagctatctccgctcagtgcatcctacacctccctgtgcctcctgggttcaagcagttctcctgcctcagcctcccgagtagctgggactacaggcatgcgccactacacctggctaatttttgtatttttagtagagatggggtttcactatgttggccaggctgatctcgaactcctgacctcaggtgatccacctgctttggcctcccaaagtgctgggattacatgggtaagttttagtatggactctgtattagatttttagtaaagtgttgattttctttgttgtaacaatggtatttaagttatatattagaatatccttatattaaagaaatgtatgctcaggtccctaggactgaagtatcatggtatctgcagctgactttcaaatggctcaggggaaagacagagataactcacatgtggcaaatgttaaccatgggcaggtttagtgaaaggtaaaagagtgtcccttacatgttcctgtaggtttgaaatttttcagattaaaaagttggagtgaaaaacagcttcaaagcaggaagtaaaagttggagctgggttttgctgcgtcgccaggtggagcagaagagccttactgcacggcggagcgtcaggttgctgtctagtccaggctctgccgcggatcagccatgggcgttgggcaggttacttccctctccaggcgtgtttcctaagaaaatcactgcagaatgtttttcagttctgatgcggctgtgatttcaagcgtctctgtttctcggtcactgaattgggacatggcaacgtgggtgtgcttcctcattcccctgggtaggtgttgagaagtgatgaggccccagggtgatgactgaggtccccccacccaccactctgcctttgctgacactcttccctctgcttgaaatggttctttgtttcctcttgaaaagtcttgcttccccttcatgacaacatcccttgggtcccctgggcagaactaaatgccctcctcttgtgacactttgcacgtacagcactttttcctttttcttttttttttttttttggggagacagggtcttgctctgtcacccaggatggagtgcagtggtgcaaacacggttcactgcaaccttaacctcctcagctcaagggatccttccacctcaggcttctgagcagctggggctacaggcacccaccaccatgcgtggctaacacttttttattttgtgtagagacaggatctgtgttgcccaggctggtctcgaactcctgggctcaagctgtcctcccaccttggcctcccaaagtgctgggattacaggtgtgagccactgtgcccggcccttgttttatttttcaaataaatgcaggaagaaagaaagagaaagcagaggtggccagatctcaagtaagtcatgccacccccaccacaaaaatccgtggaggctgagaaatacaatacctggcaaaactcagcaaacataaaagccagcagttattcaaagatatttgttgagaaaccactagggcccagttactagagctaccgagatgaacactactttaaaaaccaaaccaaacaacctgcctcatggaggcacttgcccctcagttcagtggcaagtatggtaagtgttctgcagaaaagctaagcagctgaggggagcggcaggggcccgagggtgtgcattagcattctcttcagtgggttcagggagtcacccccgggggcggtgggggcggggggtcggggagcagtgtgagtagaggctagaggaaagcacaggagcaaatcagggcccggaaactgatttcccaacagccagggctcaggagcgggccctcagtgacctccacagttgatctgggccattccacagacaggacccgacagcctgctcccacttggtgaggcctgaggcaattctccaggccacagtgaggaacctgccaccttgtttttctcgttagaagttaaaagagtagtaggtgataatgacagctctccatgtggacacggaaggcagtttcatgtagattccaccctaagtcttgcctcatatggatttgctgttcattccagccaacattgtcctttttcaagatagtatctgctgggtgctaatcatgtttagtaaactgctctcctgtttatttcatcagccttatttgatctccagcaaaggtaaaagaaaatgcaaaaagatgattctacttgttttacagagctgtaaacttacctccctgaagtcttgttgctggcaaacaatagagccagacctggggcagagctggagctgttgtccacagtgttctcacttccccgcgctgactccatggtgagggctggccttaactctctgtacccagccttgcttcccagcacagcactgcttcctggtgggcaccagccagccagactttctctaaagtactctctctctgtctgcccctctccaccttgggaaagacagtggtcagaaaaggggcagtccagagaagagccaagccatgcggtgtcatggcagccaagggagaagtttcacacaggaggcgaggagggcaagaaggagggcaagaagtctgtggcaagagcagaatggcgaggctggggcaggctgaggggagacagggtggggctgcctgtgggcagaggggagttcatagtgtgagagagttctccgagagctggaaggagaggcctccagatggcaggaggcagggtcctgtccagcagtgtctctgacttgactccctgtgtgacttgggggagccacacaatgagaagtgggaataaatgtgataatgacctcgtgatggtggtttgagcattgtgtgaagtcaggtgaagatgtcacctatgttaccagagccaagctgcatggctgcaggggctcttctgaactagcaagtgatgtgcttcagagagagactggaatttggcaaaggagaaagcccctgtctcctcctgtgtgccgggccttgtcttggggctctgtgggtagaccccagctctgctctgcactggagtgcccagacaggtctgtgtgagcacctcagtgtgggctgctccgctcccatccaggaggctccttactgatggttctcagcccagcttttaagattcacttttgttgcttgtatgttgaaggtaaacaagtcaggactttacaaactgcctcagtctggctgtgtttctgcctagctttgggaacatttatttatggccacttctctctagcccccgacccttcactactcaccccttattaacacacttggcagctgcagagcccgggccagaggcaccaggctacactgaggacgatggctcactgaggaagggtatctgaactcagacatgggcctgttctccagaagcccacagtctcaggaagaagatagtttgaagtggctgtcctgacggcttgaaagtaatcagaggcatgtggcaccttggggtggggtttggggggcagagacatatacctactgagcgtaaggaatgtacccagcatggtactggtcaccctcatgtcttgcctgttaatcaccatagaagtagaccatgctatttttatcagctccggtttacagacaataactcctcctacaaagcctgatgttctcccttcccattctcatacacccattttgcagtgatctgtttttcttgatagattgtaatctccttcagagctgagccatatgcctgttagtagttattaaatgaatgggaatgggtggataggtgtgttttgaaagcaatgacaatgtgagctttgagaaaaggtaagattcaaacctctggatgtaggaaaaagaaatcatcttgggcaggagaaatatctcttcctaattacttgaggagtagcagaaaagacatcttaattggcccaatgtcatggggatgctttcgctgccattcctggctttaccaccaggctgctggttgggctatgtgatcagacgggtccttcctcgctgaaatgtgctgggccgtttgtgggcagcctcaggtccagcagagcaagaagggaagttccctgggaccagcagagtcatctacactgtggtcttggacctctagagggcaacagataggaagagaactgtggcctaagtcctcactctacatagggagaagtctgcctaaaagaaatggcccctgccctggaggcgttcagtggtgtgcagagggacctagcatagacattgctgcagtaagtgctgtgatggtaggcacaggaccatgataatagggataataaggctcagagaaggaccatctaactcagcctggggcttcagggaagattttctaaaagaggtaacagatattccaagtctttatggatgagtacaaattagtgggtcggcttgggtcagctcggctcggctgagaaaagtatcccaggcagaggaagtggcctgagccacagcagaggccacagagtgcggggggtggagtgttaggggcctgtgtgcatttccacaagactaagccaagggttgggtcggctgtggacactttggcaagggctacaatgtgaaggcccctgagttgcctgccccagagctgggattatattgcgtaataacgatgactcccttcctcatgccacatggggtcaggtgctgctccaagtgcttacacatgttaagtcttaattctccagacaaccctataaagaagatgaggaaagaggaaagatatgggtagataaaggaggataagctatagatagataaactggggaacacagaagttttgtatgaggtcatatagctggtaagtggcagagctcccaatgagggaagaggctcagtcagtttgcctttgaggaaggtctctctggtgacattgcaattgaagggttgggggtgtgagacttcaaccagaggcgggggaacagctaggaggctgtggtctaaaataaataacaagggctgggactggcagcaaggagggagagaaagggccagatccaaaagatgtttaagaaatagaacagatggccattgggccatggagggtgaagcacaaaaaagcatctgaaatggccttcaggtttcagactcaggggactgggtaggtgttgcttccattccttgaaatgggaaacagtgaaaagaatactttctctcttaagcatgttaaattgtgaggtctctaagttatgtccaacagttagaaatatggctccacattttagaagaaaggacaggactggagagccatcgacatgggatttatcagtgtattggtgctcgtgtaaaccctggcatggatgacagagcccatgaggagacgtgaaagcgaatggtcctcaaagtttccttcatggaccatttgcctagaaccagcaaacgtgtgttacagtagagaccccgccccgcctgagacttaccacatcagaatctcctaaatgggggcctagggatttgtgttttaataaacactcacctgactcttacagtgcatacagtttttttgtttgtttttgtttttttgagatggagtctggctctgtcgcccaggctagagtgcaatggcgcaatctcggctcactgcaagctctgcctcccgggttcacgccattctcctgcctcagcctccggagtagctgggactacaagcacccgccaccatgcccggctaatttttttttgtatttttagtagagatggggtttcaccggttagccaggatggtctcgatctcctgacctcgtgatccgcccgcctcggcctcccaaagtgctgggattacaggcgtgagccaccgcgcccggccatgcatacaattttgaggatcatgagcatagagtaaaatgagaagaaattccacatagttcacgttggttttaaaatctgttttggagagcaaacccatttaagaacatggtaaatgcatttctagaagcagcatgcacgcacacttttgcagataattttggaggtttctcagactcttcaagcctttccctggacccgggattaaaaacacttgacataaaagataagtagaaaggaaacctgtgaaggaggctgagcaggaatcacagagagcgaagtggaatgccaggagaattggaaggctggggattaaggaggagaggttttcagaatgaggacatagcagtgcctggctcactaatgggcccagtgactcgagagccggaaagcacacattggagctggaagtggaaaggcagtaaccttgtctgggcttatttaagtgtattctcagggccaggggccaggttccaatgggggcttggagagtgacggcagggtgggggtggggcagggtaaggaaatggagagagcaagtgacaagacgagctgggtggggaacagcaggaagtagggagtgaagtccagtcgtatcagctggcggggtgcttgttaggtgcccacccttgcgatggttatgtggtgaaagataaaggagttcccagcagggcagctcactcaccctggtttgcccgggattatcccagttttagtgccgaatgcctacctcctaggaaacccttctgttatgggcaaatgctggttcacagtcctactgggaagaaaaaattggccctcaagacagagtatgaagagttgttctgtccaaaaggagctcccaagtctgagcattaaggctgagcaggaccaccatgccagtcccagggagagagagtgaggccttggccgcctgctttccaggaaggaggagtgtggctcctaggctgacactccagaggagcagaagagggcagcctgtaccttcccagaggcctccctctggaggagcgggtctttctccgcaggcctgggcccaggcagagctgagatgcacctttagaggcagcagacagggctgagcctcgctttgcacaggagcccacccgcagagctgtggtttcctgactcgcccatcccaggctgttgtgagagagaaggctgatggtaatctgtgacagatgcttttgcttggcagttacactttttctgagaataaatggagaggattgtgagtagaatgttcccacgggcacacaatcataaatgcactgtttttcccacagtcagggtcatttgtttaacaattattcatgtctacagcatacagggactggctttaccaaggggaaaacaaaacagttcctgccttcaaggagctcacaggctggtggtgcagacacctcagcagattcggagaggcaggacaaactgaaaagcgctctggcagagggagaagcaagcatggggctgcaggagccagcctctctctggacaggtctacatcctgtgctttttccaagttcaaccctgcactcacatttcccaaaaaacctcttgtggttagcctcgttcctccctgtggaccttcctttttcccttactttatgaatttacactctgtccttcaaggaaataacagggctaggatggcgtgtctgtgtaagcccatgagaatttcagaaaccttgttcccagccacacagggagtgggggagcaagagtccaggggcacagagcctgaacttttccagaaggattagagagtgacagcccgagattgacttcgggctgtcatcacggagggccgtgctgcaagattttttctgcatcctcctgagtagctgggactacaggcatgttccatcacacccagctgcctatgtaatagttttatcttgaaatgcattactgatttcctacatcaggtcctggaaggtctatgattaggtttcagaactacatgcagaaaatttgggatgtgttttgcttttttttttttttctcttcagtgagagatttcaacagacattcaaaaatggtctatgatatacagcaggggtgtccgatcttttggcttccctgggccacattggaagaattgtcttgggccacacataaaatacactaacattaacaatagctgatgagcttttaaaaaaatctcataatattttaagaaagtttacaaatttgggctgcattcaaagctgtcctgggccacatgcggcccacagcttggacaggcttggtgtatgatctaaaaaaattaactgctgaagcagcgacaggacaaagattgtggcttttcccatcttccctgctgtgccctgccccatgctgggctcatggacagagctcagcgagtactcagcgcttgtctgagggagctcttgaggtcagactcaccttgtacagatgaggaaactgaggcctagagtcacatggtctttctcctataagtgatagaagtgcagtctgaagctttaagagtttaggtcttgcatgacacacggagggaaattacaggtgcagattatatgggccccacaaatacatgtacgaaggcccaaaatgacaggggaattggactgcttgtttgaaaagagccttcccccaagagagaaattctagttatacctacagctcagagatgcctgttagatcccaggggggaaagaagtccaccaacctggtaacttaacaccatgcagaacaaaccagtgtgttttgactgatttcactccccaactaatcaacagattgttttgatcatataaaagaagcctgtgagacttgaagacctcatgggaaccatttagtaaatgaaatttcatatgtatatgttttttaaaaagttcattcatttattcaataaataatttaagaaaatatttgcctatcaaatttccttatagctaggcacggtagctcatgccagtaatcccagcacttcgagagaccaaagagaccaagatgggaggatcacttgagcccaggagtttgagatcagtctgggcaacatagcgaaaccctgtctctacaataacaataataataatacaaaattagatttcctcaagggatagatgatttggacaaattaaatttatgatgcctagggagggtgtgtatgatacagagtttgagtatttatccaggtgaagatgtcgagaaggcaagtcaatatatattgctcagaggcaatgtcgaggttagatagcaatcgagattttattaaaacaaaaaatttcaaaggtataataagcccaaattagcaaaacaaatcttaagtagaataaatgtgtgtattttcttgcatttaggttttgttagtagcaataaaataagagacaaaccaatactattcaaagggtggggggaaaccaggagttttggttaaccacaagtttaatttgaacctaaagtattaacaacagcaaaaaaaaaaaaaaaaaggaatctgtagctataattacaagaagaaaaatggttattggtcttcaggcatctagtggcaagcacagtgctttatttatgccatctctgtaactcccctaaaaggtgtgtgtgataccccaggtatgcttcacccccacctagtgctagcggttctctacgtgccgtgcagttctttactccctgcctctgctcagctgcctgtctcttcctcctagaaccccacatccccttcctgaattcatcttaaaacccacacagcgtttgcttcagaaagcctccccaggcctggcgcagtggctcacgcctgtaatcccagcactttgggagtccaaggcgggcagattgcttgaggctgggagttcaagaccagcctgggcaacatggtaaaaccctgtctctactaaaatttaaaaccctgtctctgctagaatttaaaagattagccaggcgtggtggtatgtgcctgtagtcccagcttcatgggaggctgaagcacaagaatcgcctgaacctgggaggcggaggttgcagtgagccaagatcgcgccactgagctccagcctgggcaacagagtgagactccgtctcaaaaaaataaataaataaaaatttaaaagaagaaagcctcccctgtccccccctcccccgcatccctccaggctggataaggtttataattactcatctgactgccttactagctgtgagctcactgagggcaggtactgttctacccatctctctttcattaatgttttttgactcactaccatctactggtcagactaagcctggaatattgtgcccagttttaggacccagactgattagttactgggatggcgaggggactggtagctttgtcgtgtggctgatggaaggaagcgctcttccttcagctatccggtgggttgtcacaggctctgcagagcaccctgtgtgactctggagagaagcgagtggcatgtcactcagaacaaggaggggttgtctaaattaaaaccatttacaaccaacgggttgctttggagagtagtaagttaagtttcccatcacccaaagctcagtgtggacttgtgagggcagcttcattggacacaaaagtggattagtgtctatagttcttttcagctctgagattatttagtgagcatttattaggcacctgctctgtgccaggttctgacacaggtcaaaagtctgcgaaaggagaaaggccaggaaggatggactagaagcatctcagaccacatcacagtgctgagaacatttgggccaggctgatagggtgtccccaaaccaaggcttcccccacagaagagtcctgtgttgggcaggaatgggctggcactggtgcccctgccacattcagtcagcggctgggagcagcatggcctctgtgcaccagctctgctcccatagcaggttctcctgcaggggaactgaagggcgtgcttccatggctgccacacagggactctagaaagcattgcccctcacacagcaccttcccagagtgctcccccagaatcatctcaagggctctgtggtcaccttccagcaaatggtagagctgggcaccaactcagatccctctgatttaataaaacccatgttttgttaaccaagaccatgctgcatctcaggatctctcctagctcctgagacagcatccagaacacacacctacttgtcgactgtcacagttagcaactgagtgtaccagaagcagtaagtgccagaattcagcccatcacttgatttatggttcatttacattgggatagaactgtgatttgacccaacgtctgtctggttctgtgtacagtttactctatcttttttttctggagacagtcttacactgtcacccaggctggagtgcggtggcacaatcacaattccctctttaaaaaaaaaaaagaaataaacgagtattgcttttttaaatttgggaattctaatatgctagagaagatgttaaagattattaggtttatgaagagccagtgggctccgagagacttcccctgaataccgtggcaggagttttagtgtattaattttagtaatgactattttatcctttcaggggcttctcccctgcttctctgtcatactttgaacaaatgaggttgctttactacgtaaatgtcttcagcaaagtatggtgcagccatctatttattttgatttatgttgcatttttctttagatcaccaaaatacttcattgcctacatagcttatctgatgctaccctagcataataccataaatgaagcattttgttggatgttgcaaagaatattatctatgtcatatgctctagagtcagacagaagtggttggaaatccccagtgtaatcactgaatacgtgtatgaacttgtatacatctttgcaagtctctgagccacttttttctcatctaaaaaaatggagaatggaggtaataaatagctgcttcataagtcatgaagcttagatgctttaataatgcattctctctctctctctttttttttttttttttccgagacagtttcactctgttgtccaggctggagtgcagtggtgcaatcttggctcactgcaacctccatctcctgggttcaagcaattcttgtgcctcagcctcccgagtagctaggattacaggcatgtgccaccgtgcctggctaatttttgtgtttttagaggcagggggcatctcaccatgttggtcaggttggtcctgacctcaagtggaccaccagcctcagcctcccaaagtgttgagattacaggcatgagctaccgtgcctggccacattctcttgtttaatacagtacatggaatgttgtgaacagttggcaaattataattgtaattcctttcttattcaagcaacttctcccctgaaaacaaagttgtgagtcttttccaagctgttgaaagttttggcacagaacctcctctccactctgcaagctccttagagaatgtaagctcatcacctcaccaggcagttcttccatagatgttggaagttctggcaattggaaagtttctttatgtcaagtagcaattggcctctatttcagaaaagggcaaagtcaacttccatccactgtagctgaggctgacaccagttttttcttgctcggcagtgaacagagtatctgccaagcccgggcttccgtgatggtctacgatgacaccagtaagaaatgggtaccaatcaaacctggccagcagggattcagccggatcaacatctaccacaacactgccagcaacaccttcagagtcgttggagtcaagttgcaggatcagcaggtcagtgctggaattacagattatacccgtgagcctgcgcaccacctcctcaccgcccaccccttacacacatgtatcattaagaggtcagaacaaaaaggtcaatattcggaatcagaggacctgggctcagattttgactccatatcctcatagttcaaagtatgacaccttaagcacactgtttcctggatttcactttttacctatgtcatatggagacagtaatccgcaccctgcctatttcactgtgttattgtcagattaaaataaataatagatgtgggaaagctttgaaaaaataatattgcaaaaatgtgttcatcttattcatatgtaaggtagctattaagatttggggttcatcaaccttctaagtcttactttagaaagagtatcaagatggtttggagaacctggggtcatttctctccctaatagttcaacctaggcaaatcagataagatagtttgtgagtgtacctggtaaatacctacataaatatgagggaacaatcatgtccacctgtgtcatgaatagtcatatacacgtaattaatggcaaaatagtctgatgtgacatggactaaaatagggacatggagaaataggctgggcgacttaaccacagtgactttggttagttcggtgctctccctccaactctcttcttatagattgacaagagcatttatagcagtgaatttaacagatctgtgattatagcatttgtgaaaaagtctatataaacagcatcttgtggcagcctttgtgggtcaagcttcagctaagttgagcagcaggttagctgctatcttggaaagaatcagcgatcggaagagagagaacagaaactctgggttctgtttttagtgtgttgcctgttgattgggtttttgctttaatcgaaatagccctattaagtttcatgatgctcatggctaacagagacatctctaccccaggacccctgataaaaggtagtctttctggctgggcacggtggctcacgcctgtaatcccagcactttgggaggccaaggcgggtggattacaaggtcaggagttcaagaccagcctggctaacacggcgaaaccccatctctactaaaaaataaaaaaaaattagccgggcgtggtggcgggcacctgtagtcccagctacttgtgaggctgaggcaggagaatggcgtgaacccaggaggcagagcttgcagtgagccgagatcgcaccacggcactccagcctgggcgacggagcgagactccgaaaagatagtctttctaaccttgaaatcttggtacctccaaaagcatccctttcccttgttgatgagccttagtggtataatggtataaatgtctttctagaaaccttctagaagctgccttcctaaaattccaattcactaattctagatctgcctttcagtgacacactgtgccacacgttgcaggatatacagaacctttggccccaattatggtgacagtcaaaaatatctcaagctttcagaacacctagtggttggggcttgtgagggcaatacctccatgtctttgacacaaggtccaccttgtgcagttcctgaatcatagtaggtgttccataagtgattgcttttattatgacaagtttcccattcccttcctgcctcttggttgccctccagggcgtagtaggaagacggcatggtgtactggaaagggcatgggaagggagagctccccaaaacccaaacaccgcctgttctcagggacctcagcacctcacagcctccttcagaggaaaccacatgttgagaaagagaccttttccccactccgggagggactgacggcagtcttcagtggtatcctgtttaaatttggagggctgtgttgattctaacttagagacctcctagagtgtgattgagaagttcagagcacagcctcccacttggaatcacatgttcaggagacaggctatcagacaggattgaggatatctccccacatggatggggcatgtttagctaggaatagaaaagagattcttggtaaaccaagacattagagaaaatggcaggaaatctggtccataacaacttttagggacctcagtagaaagactgattttcacagatttggttttagtccgtgtgggctaccaccttaaagtggtcagacatgttgagagaatcaaagattcctggttttataactaaatagggatatcttacatgtttaatgctctttatggttaatggagcacttttcatgtctattatttcattctcccagtaaggataatggtacaagaattatcatcaccattttgctaaataggtggacataaaaccaggtaatcagttatggagaaaatatatagtaagttatagtaccattagccaaaatctaacctaaatcttacattcagggtgacaaacctaaaggatttttagttgagaataagttttggtcaccaaaaaatgtggctgttgcagtggctcatgcctgtaatcccaacactttgggaggccaaggcaggtggatcacttgagcccaggagttccagaccagcctgggcaacatagtgagaccccatctctataaaaaaatatataaattatctgggcgtggtggggcatgcctgtagtcccagctactcaggaggccaggtgggagattctgttgagtccaggaggttgaggcttcagtaagccgtggtcgcgccactgcattccagcctgggtgacagggcgagattctgtctcaaaaaacaaaaacaaaaaatgttagtgagttctcaggctgaattagtagaagtagagtgaattgatagaagtagaataaattaatagagtaaattaatagaggtggagcaaattcatggaggcagaggtccagaagaagggagactgcagtcctgctctgctctgctctgctctgctctgcgtgggtcattcttcccgcagaatgctgggactgcatctgagtacaacaaactggaatctacaagaagaagggcatccaaactggtgaaagatctgaaagcgggataatatggggaacaatcgaaggagtaacaagagatatttacttgaagaagatagaaactgaagggggcatgactgcgattttcaagtctctgaagggttccatgtggaagagaaatctcactttcaatgtggaccccggagaacagacctaggaatattgcgtggatgctataatgaagaagatattaacgcagtaaaaggatgagctttcttacaagcatactgttgaaagatggaaagtgttacattgccagcctgagaggtaagattctgggaaagacagtttgtcatcaagtagagacttggatgagatgagacctccaaagcctttgccagtctgtagattctgtagtttttagatccaggcatatatggggtcaagaagatagttctccaccatcaagcatctttcttttttgtagaggactcttgactctttttacccagaggcccccaaaacatgtgaaggcagtacagtcatgcacctcttaatgatgaggatacatcctgagaaatgcgcccctgggggattttgttgtcatgtgagtgtgctcacacaaacctagatggtacagcctactacacacctaggctgtatggtatagcctgttgctcctaggctacaaacccatacagcatgttactgtaccgaatactgcaggcagttgtaacacagtggtatttgtgtgtataaatatacgtgagcatagaaaaagtatagtaaaaataccgtactatagtcttatgggaccaccatcatatatgcagtctgttgttgaccaaaacatcattatgtggtccatgattatatatggagttgcaagaccttcctttaaatgaagaggaaaggcactcctacactccccagaataaaacttgtgtaaacgttgtaattatgggctcctatgcaaaaagtatgacattttaaaatgttaatccttcagcaagtgtccagatcagtcctgccaaaccttggagaattatttttaaaataaagctgataaggagatcccaacgaggcctccaaaaacaaaaagttgaaagtaaaaaattggaaaaagataaaccttacaaacaccaaaagaaattgatgtggctatgttaatatcagacaaagcagactttaaggcaataagtattcctaaagataatgacagacctttttaatgctaaaagggcaattgaaaaagaagtcatagcatccctacatttgtatgaatccattcatatatcttcaaaacacataacgcaaaaatctaaagggagaagagacaaattcagaagcatagttggagattctaatcatacctccaagctactaattgaataaagacatagaaataagtaaagacagaaaacttgaataacattattaaccaacttgagctaattttcatttgtagaaactatagccaacaactgtacgatgcatagtcttctcaagtaaacaaaacatttaccaaaatagaccatatgctgggccataaagcaagtgtcaagttaaaaaggatggaactcacacagagtatgttctttgaccacagaggaattaaaccagaaattagtaacagagggtaacttttaaaatctccaaatgtttggaaattaagtggtctaatactggatgaaccatgagacagaaaagaaatcacagtgtaaactagaaaatattttgaactgaacagtaatgacaatataacatagcaatacttgtgggacgcagctagaacagtacatatgagccaggcgcagtggctcatgcctgtaatcccggcattttgggaggccaatgagggaggaccacctggggccaggagttttgagaccatcctggtcaatatagtgggactccaaaatccacctctaccaacaaaaaattttttaattaactgggtgtggtggcatgtgcctgtagtccttgctactcaggaggctgaagctggaggatcacttgagccaaggagtttgaggctgcagtgagccatggtggtactactgcactccagcctggacaacaaagtgataaccttgtctcaaaaaaaaagccccaaaaagtacatatggggaaatttatagctataaatgcatatattagaaaaagaagagtatttgaaaatcagtgatctatgccactatctcaagatggtagaagaaaaatgaaagcaaattaaacccaacaaaagtagaaggaaggaaaaaataaaaactaatgaaatagaaagcagatgtatgatagagaaacacaaaatgtcgcggtttttttgaatgagaaagttggttctttgaaaaaaaattaaattaataaacctttattgagagtgagaaagagaaaacacaaattgccaatataatgaatgaaaggggaaatcactacagatcctataaactaaaaacatagaatatcgttagtaataaccttgtgccggtaaacttgacagcttagataagatggacatattccttgaaaaacataaagaagaaacaatgccagtcttacattactccttcggagatgagagaaacaaagcctgcttcctataatgtcttcttacaaccatgctgtataaccatgatacaaaaactgcacaaaaaccttacaagaaaagaaaattacaagttattatttctaatgaacaataatgcagtaagtaagcctgaacaaacgattaatgacttgaatctaataatgtattaaaaagaaaattttgaaaaataagatttattccaggaatgcaagattgatttaatggaataaagccggaaaaccgtaaggtcatctcacagatggagaaaaagcatttggtaaaattcagtatcccttcatgataaaaactgaggaaactaggaattaaaagtacaaaagtgatttatttaatcagataaagggtatctacaaacaacaacaaaacaaaaaccatagctgacgtcatagtatcccactttccacctgaattcaagaacaagacaagaatgttcactctcacctctttgatttagcagttggaaaggaagaagcaaaaccatctcgcattgcagatgacttaatagtgtatgtggaaaatgtgaaagtagctacaaactattatagtaatataataatatatactaatattatattaagtgaatttggcatggtcactggatagaagattgtgatattatcatatatgtattagttttcatcgacgcttcctagctggtagctcccagagcccttattagaatgtcggcgtgctgcccgcctcagaaaacaagagtctctctctgcctttctcctgccctcctttcacctgccccttttctccccaaggcaggaatcgtcccctgcttttctgactggaagctggtcttaacgaaattccctgacctaccttgtctgattgtgggtgctaagaccctcatttcagaatgggttccgccccatatcctagaggaaggaatgctacagagaggccgaggagaatctgaatcaacaggccttgctgggtttccccactctgttattgtgagatcataccctttttatccaatcacatttctacacagtggtcaatcgtacccatccagtaaagtctccataaaaggaccaaaaaggcagagttgggagagcttccagagagctgacctggtggaggttcctggagggggggcaggcctagggagagcggaggagctccatcctcttcctgcatcctttgccctgtgcgtctcttatctgcccactcatctgtagcctttcttatgccctttattaagaaacccgtaaacctaggtaaacggtttccctgagttttgtgagcatgctagcaaattcatcagacccaaggcaggggtcatgataaccatgatttatagcccgtgggtcggaagcacaagtcacaacctgcacttgcgactggcatctgaagttggggtagtcttgtgggactcagccctcaacccgtggaacctgatgctgtctccaggtgtataatgtcagaattatagaggacacttgacgtctacttgagaatctgcagaattgcttgcttgttgtatgagagtagagaatagaggctgggtgcagtggctcttgactgtatgagtgtacagcactttgggaggccgaggcaggaggatcacttgagcccaggagttcaagaccagcctgggcaacatagcaagacctcgtctctacaaataaaaaagttgtaaattagctaggcatggtggcacacacttatgtcccagctactcgggaggctgaggcaggaggatcccttgcgcccaggagtttgaggctgcagtgagccatgatcatgccagtgcactccagtgtgggtaacagaatgagaccccatctcattctagggtctcaaaaagaataggaaaaacactttagtttttcttatatccttacaagtacatatgtccactaaaatatatgtatgaaaatgttcataacagttgtattcatatcagccaagaatgcaaaactacccatgtccatcagcaggagaatggagaagttgtggttaaaaaaatggaatactatgtagcagtcaataagaattcagccagactcagtggttcacacccataatcccaacactttgggagaccgaggtgggcagatcacctgaggtcagggtttcaagatcagcctggccaacatggtgaaaccccatcaatactaaaaatacaaacattagccaggtgtaatggcatgcacctgtaatcccagctacttgggaggctgaagcaggagaatcgcttgaacccaggaggcagaggttgcagtgagctgagattgtgccattacactccagcctgggtgacaggagcgaaactccatctcaaaaaaacaaacaaacaaacaaaaagaatgaaatatggatatatgcggtaacatggtgaatctcataaagattgtgttgagggaaataagccagaaacaaaagagtacataccatataccacaggagtccatttctatgtagcttaagaacagacacattttgccaatggtgttagaaataagaaacatggttatctctacaagtgagtgttgggtgatgggtactaaatgaagcagcctcacccaaaagtggacttgcaaaaatgcacgtgttcaggtggatcctttgactcactctaagcagagtaaacaaagaggtggaaccattaggtactgagattttagctgttggctggtcaggtctggcagttaataaacactggccacctcaacaaatggtcaagtgacattggccttgtgtcactgcacatacatccaaaacacattgcactggactctcctgttttagaagtcaattttcaaataataaatataaattttgtaatggtcatgtctctctagccatttggcttacagggatatatcctgtagaaatacatcttcacaggaatattcagtgcagtattatttataatattatcttcatcttacatgtgaggaaactgatatgagcaacttgtctaaggttatacagctgaaaagtaataacgccagggttttaatgcagaaccctctgacgtaaaaccctctgctcattccttgtacctagtatgcttgtcttcaaagcagtcatagaccgttgggggctgtgtgtagacaccaaacagcagcagttggtgagcagcctttgtactgcagttgtagatagaacagaaacggcagggccaggggccttcaatcagcgaccaagcatgtgtggcagagcccagagaacttacagaactgggatacgtcctctagaaaggcttcactgcactctctcagtcccatatcctaaaacttcctgagttggaagtgatttatgaggctccaaaggttagtgctaggaccagagagggaattataggaagaaggatttcagctcattatacaacagtcctccacttagctgtggctttgctttctgaggtttcacatacccaagatccactgcaggctgaaaatattaattaaatgggaaattccagaaataagtcataaattttaaattatgtgccattccaaatattataattgttccattttattattagttattgttgttaatctctgactatggctaatttatgagttaaattttatcataggtatgtatgtataggaaaaaacatagtctatatagggttctgtactacccacatttcaggtatccactgggggtcttggaaccaattctgcatggataagcggggactaccatactggcaacaaaaaaaaatcacgaagtcctcggcttctaaatccaatttccccattagcttactgtgtaactttggacaagtcactcattctccctggacctcatttcctgactgtaaaaagagcggattgagttagataatccctaaggtgctatttagccccttcagtggttgtctgctggccatattgtccatattctggattaggcgtcatctgcccctcaattctcatttcccccccaagagccactttgaggtttggaaaaaaagaaaaattctcactcatcttaagttcctctctaagaatgtagccaaccagagagttcaaatcatagggttctaggccaggcccagtggctcatgcctgtaatcccagcactttgggaggccaaggcgggagcattacttgaggtcaggagttcgagacagcctggtcaacatggtgaaaccctgactctactttaaaaaaaaaaaaattggatggggcatggtggcatgtacctgtagtcccagctactcaggaggctgagacaggaggatcacttgaacctaggaggtggaggctgcagtgagccaagatcgtgccactgcactccagcctgggcgacagagcaagactccatcttaaaaaaccatactacgggccaggcacggtggctcacgcctgtaatctcagcactttgggaggccgaggcgggcagatcacgaggtcaggagattgagaccatcccagctaacacagtgaagccccgtctctactaaaaatacaaaaaattagctgggcgtggtggcaggcgtctatagttccagctactctggaggctgaggcaggagaaacgtttgaacccgggaggtggaggttgcagtgagccaagatcgcaccactgcactccagcctgggtgacagagcgagactccgtctaaaaaaacaaaacaaaacaaaacaaaaacggtactaaaaattttttttgttttaaatcaagtcaaatcatagggttctaaatttcatttccccagaatatctcctcacgtatctggagacagtagtcgtgagacactaaagtatcttttatcttgcttcagtatctcttaaccattcctgatataaggtggtttcaagaccttcttcaatttttaaagcattttcctctggcttgcttcagtttgctactgtccactagaaatgcaacaccaaaaatgaaaacaaaaaacttgaacacagaacttctgatagggacttaccagggcagaatggagcaggttcttctcttccctcatgctggtcactgtaccactgttaatgtgtcctataatctaaagagctgttttcacaacagttaactttgctggttcttattatttggtagttattagttactagttattatttgctagttcttatgagtcctttttctgatgacctataactaaacctagtcacccccagtctagttcttttggtttagctgtgtgtgcatgtgaatctatacccctggcacaaagagcaaaaaaacagagaactaccctggaacttgtgtgtagttgttggccaaaatatgtgcctgtcaatatgtaacaattaagttgtgaaacaattacaggttttgttgttgttgttgttgttgtttgagacagagtctggctctgttgcccaggctggagtgcaatggcgcaatctcggctcactgcaatctccacctcctgggttcaagcgattctcgtgcctcagcctcccaagtagctgggactacaggcacccaccaccattctcggcttatttttgtatttttagtagagacggggttttgccatattggccaggctgatcttgaacttctgacctcaggtgatccgcccaccttggcctcccaaagtcctgggattacaggtgtgagccaccatgcccagcttcaattacgtttttttagctgatttagtgtactgtgtgtgtgtcccctctttccctgcctgtgcctgtcataggaagacccaagcccaccttccacccaagacttggaaaacagcttttctggatgtcactcatgtttgctgtcctctggctttaccttatccagcagcacagcagtgtggagcaataaaggaaagtgataaatcagcatagagagcgttatccccaacctcagatcacacagtccttgcaaccttaaagccagacaaaatctgagaaatcatcttgtacttctaaagcaaaatcctttccatggcgtctctaagagctggctctccggcctcatccagactctgcttgcatacttccattcgtagagatcttcatatttctccattcagtcactggcagcctaccttgtgccaggagctgtgtcagttactttctcatatataatttaatcctcacaacacactgtgagggtgccatgccatagccatatcacattcttctccatttgacagaccagaaaaccgatcattcataagtgtcatgatgttagatcatctgactccaagctagaagggatgggaagcagaatgagggctccagccccagcatcttttcctccagggcacgacttaggaatatagtcttaaagtactttgaaataatcttcttttaaatctctgaaagagcagaagtttagaggtcaggcagacctggtgttgaatcccctagcagcttgtaagcacctgaatgtctggattctgtcgtctctgtatccttccctgctgggcctggcattgctcctggcagtcagttgatgctttttgattgagtaataagatatgaataatgctgtatacatgtgtggtacataaactttcccaagttattctttcgacacatagcccacttattaatgcattcaaagtactagacactatgcagagggctataggaggcataaatatgaattatagaagacttgcccttaggagctttatatctagaaggtaagctataaataagatacgtatcacaatgtgatcttcgcagtaaccccattggattggtaaagccagaattattatccccatcttataagtggagaaactgagccccagcaaagtgcagtgactgccatgagtggagtggctgagaggcagggccaaaccagagccagggaacctgcctcccagctcagctgttcatctggaggttgtaactacatagcattattagttaaaggaaagaacaggttttgcaaaccctcactgttctatagattatggtctgaaaatctacctgatattgcttttcccttcttcaaaccccatccccatcttcctgtcctctcaaggatacagtatacttgctccatcgcagcgccctcgagctcacttacattttatttatttacacgtatttctctctcctttctcctccaggttgtgatcaattattcaatcgtgaaagggctgaagtacaatcaggccacgccaaccttccaccagtggcgagatgcccgccaggtctacggcttaaactttgcaagtaaagaagaggcaaccacgttctccaatgcaatgctgtttgccctgaacatcatgaattcccaagaaggaggtaagtagggctttgtcttggcctgatgctgagaccctctcttgttctacctctgccctcccacagctctggctctccgggtatcctagcactgtcactgcattgagctgaggttgcatgtgttctcagagaaacctgctgcctgcctttagatttagagatattaacaattcagaggaggaaagaatggagtttgtatctctttgccacttgtgagatatagatttgtacagatgtgtccctgaagccacatatccagatctgttttaaacttgccatcctgtttccatattccagagcaaacatttgagagagatgggagaaaacagtcaagaatttatttttgaatttaattattcattcatatgtttaacaaaagtttattaaatgcttactgagggcaagaaaccgtgtaggcaaaatagataagaaatgaacagcggccttcccctcaaggcatttagtttttcatggtagacaggttcataaacagctaactggaatgtattgcagtaagtgtttaaataaaggtacgtgcaaggtacttagggaccacagaataggacataagtaactgcccttcagagccgccaagggagacctccacagtggtggtgccgtctgagccggagttctgggtgagcagttcacaggcagaggcaggagtgggcatcgcaggcgggaaaagcagcaaaggcagaagggcctgagtgagcccgtagtgctgggaagagggcgatgcagcatttctggggcctggagtgcagataggaaagagattggaaatgaaattggaaaggcatcagggcttgcacagtgaaaggccccaaatacctggaagactttgggcttgcttgatacttagggtagacattgggagaggggctagcaaaaagtttctcagcaggacagttaaagcaaagaagcagaattacatgtggcttttattggacatttgcagtggtagctttggagggagaaacaaggctttcccaggatgggtgtcttgattgactgggttatggtcctgccatcggctggagagcctaccttgggagaacttggtagttaagaaccaggcatggagtcacactggtcagtttgagtcctggttctgacatatgctagcagaggaactcttgagcaagttactgaatgtttttgtgcctcaatttccttacctataaaatcgggggatatagagttgtttttacatttaaatgaactagaatgtaaaatgtttctcaggttgcctggcctagtaacaactctattagcatttgtgagtattattacgatcattattgttgctgctgctgttactgctatcagaattgaggtgggaaatgaagagacatagtactcagaacctggagggctgtggcatttaaatatctactggcgccaggcgtggtggctcaggcctataatcctaacactttgagagaccaaggcagaaggatcacttgaggtccggagttcaagaccaacctaggcaacatagcaagaccctgtctctacaaaaaaaaaaaaaaaaaaaagaaaaagtgtgtactgggcctgatatattggagctttaggacccagtttaagtgttaggagatctgggcattgtggtgcatgcctgcaattcatgaggctgaggtagaagaatcacttgagtccaagagttcgagtccagcctggacaacatagtgagagcctgtgtcttacatacaaacacacacccacacacacacacactgtaggagagttttgtggtttttttaagtaaataaagaacatgttttgaacatgcttcccatgggtcgtgcgtagagcaggtactggcagctttccctatcttgacaatgctccaaagtttgtagattttctgcttagtacttggagagcatggtaaggaagcatcttaatcatggcagtgttgagtgatgagcacagggcctgaggcatcgtaagtgcccagcaaatgtttactaaactgtctgtttccacccaagagccatgaggtgaatttaacatttccgtctgaacttacctcgcctgcctccaggatgtgggagttaagcttttttttttttttttaattttattttagtagagacagagtttcactatgttggccaggatagtcttgatctcctgaccttgtgatccgcccaccttggccttccaaagtgctgggattacaggcgtgagccactgcgcccggcccagctttattttacttgtacatgcagatacttgtagtttttatttaatttaagtggttggtctgaaagtgctttttttttttgcccccaaggtagctttattttacttgtacatgcagataccttgggggcaaaaaaaaaaaaaaaaaacactttcagagcaagtgcttaaattaaataaaaactgctagttattttattaaattcaccagagaatcacaggtaaatctgttaatcctgccctcattttcagataagaaagccatgccgcattatgaggaaacaacttctcgttgtcagatagtaagatccagaacccgacctcctacattccctggggttgaatgagtgtcttgttgaggcgggggcgggagacatcagctagtttggatgtatgcatacaatgtgagagtaccccaatttgaagctttcatgaggaggaacagttagttgtccactctggttcagctggtagtgacctcctttgcatggactgcaggtcctgcagcccactgacgaataagcttttgcttcagccgaggtccaagcctactgacaataccatgcgcagataagcagatgcaacttgatgaactgttaacacgtgtgtgcgcagttcccagtgccagaccgagaaagaaaatgtagtcagcaccaaaaggccctccccgcagtccctgcacttaagaatagatacgaagtccacttttgtttttgtttttgagcgtcatgtaaatgaaatcatacagtgtgtatgattagcttggcttgttggcatgtgtctgtagtctcaactacttgggaggctgaggtgggaggattgcttgagcccaggaggcagagattgcagttgcagtgagccaagattgcaccactgcactccagcctgtgtgacagagcaagagtctgtctcaaaaaaaaaaaaaaaaaaaaaaaaatggaagtatgaaccttccaacatttatgtggctaaggtactctgccgaggaccatgcaaagatgtgccataatgtaagcaccatctacttttaaacatgttggttgtccccattttccacgattatcctcatgtggtagagggcattcttgttatttttatgtgtatgtatactttgtatctcatgtgtccatattcgcatgcttgtccagttattttccttgggcatgtttctgtgtcaaacaatatatgtgcttttcaagttttgggtccgggcatggtggctcatgcctgtaatcccagcactttgggaggccgaggtgggcagatcacctgaggtcaagagttcgagaccagcctggccaacctcgtctctactaaaaagacaaaattaggccgggcgcggtggctcacacctgtaatcccaatacttggggaggccaaggcaggcagatcacctgaggtcgggagttccaagaccagcctgacaaacatagggaaaccccatctctactaaaaatataaaattaggcatgatggtgcgtgcctgtaatcccagttactcgggaggctgaggcaggagaatcgcttgaacccagggggcgggattacggtgagctgagattgtgccattgcactccactttgggcaacaagagcgaaactctgtctcaaaaaaaagaaaattagctgggtgtggtgacgcatgcctataattccagctactcgggaggctgagacaggagaatcacttgaacccaggaggcagaggttgcagtaagccgagattgtaccattatgctccagcctgggcaacaagagtgaaactccgtctcaaaaaaataagtaaaaattagaaaataaagttttgggaagtcttgccaaatgccttctagcatgactatactggtttacacgctgtccagcacaagacagttgcccactcctcagacttcataattcataagcactaggcattagtactctcattaatctttgtaaacacaagagaagggaaacatttttatttgcatttttctttttttgggaggatggagtctcgctctgtcactcaggctggagtgcagtggcactatctcggcttattgcaacctctgcctcctggttcaagtgattcccttgcctcagcctcatgagaagctgtgattacaggcgcccaccactatgcctggctaatttttgtatttttagtagagacgaggtttcaccatgttggccaggccagtctcaaactcctgacctcaagtgatccgcccacctcagcctcccaaagtgctgggattaaggtgtaagtcaccatgcccggtctgacttgcatttttccttactggtaagggtgaacatttgcatacattagtaggcaatttcatcttttctgttatttttatcagtacctttgacaagtgcagcgcagcatagaggaacacagcctccttgcaccttttgctatatctgcataatttccctctccccaggtgcgtgcatcctctaatgacaaagcaaccttgtatttccttccacaaatgaatggaggcagcctaacgtcatgtggtatgttccaggctcatgatagaggataagtacacctccttggctgtcaggtgacatctacattgtctacattttaggagttgttattgttattcgtgtttgtcattccttggacctttccttctgctggagaaacttcttgtttagcttctagagccatgttggtgggtcacagattccttggctcttcctcgtctggcttctgaaagagacgccatctggtgtaatgatggggaagggagagctagcagctaagagacctagattcctccagaagtgccagagggagggttggcgtttttctcccatgctggcccctacccacccgttcctcttctctccttaaagggcagttctgaccagagtatttctctgctgcctgctgatcttggcacccaccatcatactgtcacctacttttaaaaatggacataaagggtgggcacagtggctcacgcctgtaatcccaccactttgtgaggctgaggcgggcggatcacaaggtcaagagatcaagaccatcctggccaacatggtgaaactctgtctctactaaaagaaaaaatacaaaaattagctgggcttggtggcgtgcacctctagtcccagctacttgggaggctgaggcaggagaatcgcttgaacccggaagaaaaaggttgcagtgagccgagatcgcctcactgcactccagcctggcaacagagcaagactccgtctcaaaaaaaaaaaaaaaaagacacaaatcagaggcaagattctgtggctctggggcttaagaggttgtcattttatattttcccagagagtttttttttttttttgaaggaaaaggataccaaaagtgacaagagcacacagggagctttcagatgagcttgtgtttttgttttctaaaaatatgcaaacagtagaaaggcacacagccaaggacagatgtagaaaagtcagcgtcctgtagggattggatgccaagcttttcaaatattgttctctccctggaatgttttcttaccatctctgcttatcaacatcctccccagccctctggatccagcctagtgctctctcagcaaagctttcctcctccctcaacttctgtctccccgcttggcctcctgggacacttggtttctgcctctctttatccatttcctcttcattttgcctgctcatgtactgatctttcctctcctactgggtttccctttctctgggaagacttctgtggccccccatgcccaccccaggtgaggatgaggcgccccttctatgtgctccccatgctccccattgccattcaccactttgtaacattaaggcccggctgctgtttggtctcccacaaggctgttgtgagaggcagagacacagcagctgacctggatccccattggatcccagcgcccatcacagtgcatgatgcatccacagacccaaaagagctgttgagtgttgagtgcatagatacaagctcctgagggcaaggaggtatgtgcttttctctgcgtttttcacatcccggcacccagggccctgtgtgctgtgggtatatgcatgcacgtgctgcaggagggtgcgtgtgagcgtgtgtgtgtgcatatgtacttattctgagcaagttacttgatctccctgtgccccagtcgcctgacctgtacctgcccgttggttgttctgaggactaactgtgatcatccctttagagtgctcaggacagttcctaacaccaagtaagtgtttggtaaatagttgctgtctttttaaaacccactgtgaccttttcaggtggcactgggccggggacaagtacatagtctacctctgcattcagcagccccaggggacttgacttttgagttcttctatttattatgatggtggtggtttaaatcttcttcctctcaggcagaccttcagccgttacttttctttttctttattgtaatatctggtcctgaaagctgaaagtcattactttcattgttgatcagatctctggctttagcttctccttttctcatattggattaattggttatttatgtggataatactgtctcaaagcatgagttattctctgggttgtgcctcctaattggtgaaggtggccacttggtttatttgagacaattctaaggaataaggagctctccacactagtgtgagggccccagggcaaaagatgtttttctgctcctcagaaagttctcagagaacttggcaaggtttttataaaccctgcaaagctcccgttatgatggggatgaggtagttctgcattaaaaatagtcataacagttaccagtcctcataataatttttattggaactatcagaagtctgagtgcctatttgagaaagagtttccttggatgaatcactgcaggaacatgagaaagaaacatggcactgtgagatcaaatgtgtagataaataatcccccgctgagctgcagtcacaagtgaatttaaagataggaagggttttaggggtatataatccagtttctcctctctttacttttttttttttttttttttttttttaacttttggagctactcctgtagctgaaggagaagaagggatgggagctggcctcacagagggctttgtagagccacggggccccagggtcagaccttgtgccggtcatgccaacatccagggccacctccttgctgctccatctactgcctcctgttgggcagctgcagccagtgcccttggccctgcatgtttactcaatcatgctacttagcatgttttattcaggacacctctttggtaccagcatccctactagcacgctagtcctgttgggagcaggacctgtgttgtctcagtcatccctgcctctctagaacaagtacagaggcgacacaccacggggactcaggatatgtgtgataactgcatgagccttttcaccttttgaatctcagcaaccctctaagaacagggaccccaattctagccttccagactgagactcaggaggcctggctcttgccctagtcccaccatctgctgactgtgtgacctcatcaggtctagtgacattttcgagcctcagtatcctcatttggaagacagagtactgattgtcctccacagtcttttgccaggcaaggcgcccttcagggtgccgggtaagctgtcatctgcttggtaagaggtcatggtgttgaggtaaccaagagacctgggtgctagacctggctgtgctctttctttgcatgtgccttgggcaactcatttccctttcttggaccttggtttcttcgtctgtgaaatgtaggtggttatccgtggcatgtctgtctcgcagcatgagagtccaaggggacgatggctgtagaagtatttgagacagacagcctagcacaagcaggaagggctgtgatggtgactagcagtaagtagtagtggttgtagcagcagcagccgcttggccacatcccaactgaatagggaacatgcctcccctgccacagtgtctgaaactctgcagaaagtttgactgtccatgagcttccttgagtcgggggagaacctgccctgcaagccgggaggaggctcttgcccccactcagcctttgcctcgcatgtggctttagttacgttttgtcttctttgtaggtgttgatgttctagactctgaaatggcagtgtcagaccagacaagaagctctcaccagagacaaagtggaaacggagagctgttggcgatttaggggacagcggggacaggtgcacattgcaatgtgcaggatcatcctgcgcagtgaagtcttgtcttgcgtgtcccaccaaaacatgcagttgaaaaactcaagccagagcttgctctgttttaagaaaaagcacttatttttttaaccaggtttagtatgtgctgaattttctaggaatttgactactgcatccgtcaaaagaaaatcatacttaattttgtttgtaactttaccaagagttgttttctgtttcgtaaagtcctatctccagcatcgtcactgtgacgtttcagtcatccatagacctccccttcgtcacatcccatttgcagcagcagcactcccagtgggtctgtgggtaggtgcaagcgtggaccgcctccgtctcctagtgtagctgggtctggccctttatgtgttgtaatgcacattttattatagactgcttctcttttctctctcctttgcagtacatgtaaggcattatatccgaatttaggtaggtaggttatgtaatctatgaatttcacttcaggataatgcaaggatcattacaaaacattataataaaaagaggaccatcgggcctgagagggttgaagttttgtgaaactcgggctggttccttcctgcattgcatctgtgtcttgcctggttgtcgcttaacagtgccatggagatagcacagtgtctgtctcatttcacagccaggaaaactgagccccagagggaggaagtttgtacttggcccaaaccacttcctgatatgacccagtcaggaagagaagccaggatgagaacatgctcctcttctcctccagtgcctggaagtgtggtgggagcagcttggtctagcaggaagagtgcatgtcctggagccgggctacgttgggtctgtgtgaccctgagcaagtcacctcctccatcagcaggtggaatgacaccacaggcccgtggcagttcacatgacacgaagatgcccggtgcctggtatgtggccttcagggccgtgccccatgctgctcctctttttgtccccacatccagcagttttccattaaaccactgtaggtcctctcagaacttactagagtcatcgtgtcatcgtctcccattactccaggagagcagggccctggtggcacttgaggcaagaccccaagctgatggcactcgaccacatagtgggagtgaattttaaagaaaatccccctcaaagcctctgctggtgtagaaggcagatagtctaggccggggtagggccagtgagtgggagccagggaaggaggcttgggtgtcatgagactgggtttacatttacagatgacaaaaccaagacccagtgagggggaggatgtgtgcaggccacaggacaagtctgagcagaaccatggccacgcccaacgttcctccactagcattccctcatgaaagatcactttttccaggccaaggaccagaaaaggaccaggctttaggaagagggccgaggtgcatggaaagcagtgctggtgaggagagggttgagtaactggattttgactgtttcttcgcatttggttctcactaatgaaatcttgtcagacgtgcccctgctgctggattgggtgggggtgggacagaagcatgtgtggtcaaaggcaagtttatttgcagtttgggggttgaatgcagtggatttcaaactggatattttgaggagttccaggggtccaccaaggtataccagggtcctcgccctgatgcaaccagagtagttcttcatcgactttatacagtgggactctgaagaaaagaaaaaggaaaaccccatagcttagtgggaatccgggcgaattaaaacacaggatgaagtgcttgttctctttggctcttggagcataatgtatgtccttttcctacttggtttgcgtgtaataacatcattggtatatttcaaaatatgaagctcctggtgctggataataaatgttttcccagtttttcaacctcttatgtccttcattgatgcccagtggcccaggggctgcaccttcagcacagtgttgagaaagagccccggaaagggacttacaggcagaccttcccgggaagagtcaggcccagctccatgtgctctttggaggggagtggaaggttgttaaacctcatagctcttggaggtggggctgaattttgcttcttgtaaacctctttccattggaaattacctctttctcccctaaagagaaggaagtactggactgtcttcatctccctggctgccgaggccatttgacaccttgtgccacctgagagaaagcaggcccagcatggccctgcctgaggggaacaggacggcaagcccctggcctcctgcctgctcccagctgccctctggcggccactttctgaaagccggatatgtctctttgctgacccacccctgttctcaccccagggctccagatgttgtatcaggcagggcctttgtacgcctccatgccaacagctacccaagtcgcaccgtcagtcacactcttactcaggctctcctgtgcccctggcccttcttcccctctcacttttccccacacttctaaaatctcactcgtcctgtcagaatgtggctccacagatggagcctttcccagccgccccgctccctgtgactttgcactccctcctgcactcccacggggctttatttttgcctctgtcctaacagtcagctgccacttggcctgtcctgctattcccactgcatgaatctagtcaggttggaaattcagaaagtggcctctttgtctctggaccccaaaaacccacacatcgtctgccttataagctctcagtatatccatccctggctgcaggaacacaccaggacccagaggctgccgtgcctggagccctgtctcctgactcagcccaggccccagctcagcatcgaggtcctgtgggaccatgtccagcagtgaaggctgtgcattggcctgagcccctggtccctctgactcactggctcccattttcaccacctgcactgcatattctcaccgtctctcccctgacactctctcccctgaagtgttgtaatggggttgtaacccatccaccttctcttgtccttcttcagtctgtcctccctgggctgcgtctaaaggggccccgcccctgccctcatgcatgttctctccatactcctggtcaccttctgctcatcctttgccctgctgttgtgaagccttcccagtgccccagaagacctcaggcaccccttcccagtcctcgcacactgttggtgtcccatttgtttggaccctgggtttgtttgtctagactgtgagctcctcgagggcaggtgtctgtttctgtgtctcgggagccctgaagagagactgacacatcagaggtgtctggtgactgaacaagctcccagcttgcgcccatgtcatattgtgtgcctctcatagcctggcacttcctgccattgcatccttctctgcagactaagatggagttcctgaaccaagaccgcttgctggccaacctgtgaaactgggctcaaggtgaggggtgctatctgtgattgagggacatggttaatggaattgtctcacacagaaatcgcacccgtcaccttggcctacttatcaccaccccaaacagaggaacacgccttctccagccacagcctatggaagggccttcagctgctgtggccccgaggtgtgcatactgtggaaggaacttcggacgtgaactcggatctggttccagtaccagctgtgccaggagtgtgcccttgggcatgtcactgacctaagactcagtttcgccatctgtgaaatggctgaatcagactcacctcacagggttgttgtgagggtaccatgagatgatgtttgtaaacattctttgtcacctctaaattactataacagtttgaagttactctttttaaaaaaattatttgcaaaggtaactaacaatatcagccgtgcacagtggctcatgcctgtaatcccagcactttaggaggtcaggggatcacttcagtgtgagagttcgagacctgcctggtcaacatagcaagacccttgtctctacaaaagcattaaaaattagctaagtgtgatggcgtgtgcctgtggtcccagctactcaggaggctggggtagcagaattgcttgagccctggagtctgaggctgcagtgagccatggttacaccactgcacttcagcctgggcaacagagcaagacgctgtctcaggaaaaaaaaaaaaaggtaactaacaatatcaactcctgtgtggtgccagcagccatcacgttgggacacagagggaagccaggcttcttggatcctgatggtcagagaacactttctgagggaagcggggcttgaacctgggccctgcagggctgggggtgaatggggggatctgatgaggaggaggacggcggcaccagcagatcttggtggtttggaagttcaaatcaagatctgagaagaggctctgtctgaccctgggggtctccctcggcacattggtagtactgtgcatgcctcacgggtgcccctaatttcagagcatcccacctgcatcctgctgctgccattgtcctcctcaaaagagctgctggcttattgcagtttacatcctagagaagagaggtctcctccttccaccagtcccaggattatctccctaacgctaatggcgagattcctttggagttttagtcttctgtagatacagcccaggcgccatgtgcccagtcagggtttgagataggtggtggttcattccccagccttgcctcaccagcaccttcctgacgcctcctggtagggctcaggaagcagccagctgaggtgtgcctgccatggtcagcacagtggttgacagaagtggcacagattgtgggggcaggtgacagggtaccatgccctagctccaggcacccgctccaccctgtcacatggagcagctgtgaaaccttgagcaagccatttcaccattctaagccttagtgtcctcattttttttttttttttttttttgtgatagagtctagctcttgttgcccaggctggagtgcagtggtgcaaactcagctcactgcaacctctgcctcccaggttcaagcgattctcctgcctcagcctcccaagtagctgggactacaggcatgcgccaccacgcccggctaatttttgtatttttagtagagacagggtttcaccatgttggccaggctggtcttgaactcctgacctctggtgatccacccacctcggcctcccaaagtgctgggattacaggtgtgagccaccgtgcccggccagtttccttgtctttaaaatgggtgtgacaaccacctcacagagttgtcatgaggctcaaatgataaaatagatgggactgtgatttgtaagcatacggcacagtgaatgcaagttgttcctggagtgcccaatccctagatactgggatctcacccctcagtcgtagccagagtcatttcattctggtgtgccaccacccagagctaagccgtatactccttacagaaaggaacaaaccccttcctggatgctcttgtgcctggatcttggctccctgagattgcagggagatagcaggaattactttctccattttaagaaggaagaaacaaaggctcacagtgctaagaaacttgccccaggccactctggtgaatgcagagcttaaggcccagagcccagatgttctgatttccagtccaggtctctgcccagtggaccagactgcctctcaaaagaccctgctcagctggcagccccccagctttctaaactataacccggcttggtcagaggttgattattataaacacttaacctgccccatctttctagccacatacccacatcttcgaaagtgagggaagaattcattcacagctgttttcttttttcctcgcgtagcgtgtatcatttctttcctaaggaaggagttttacaagtagcctcctgccagcttcagctcatataggataaaagccagctcaaatattttggtagataactccggagactcagaaagccaactgctgaacttgagatacagtttccagtttgagagtggacaggctgcgagtgtttgaggccctgccccctgcctatctgctgcctgccctctctcatccaggtgtccatgcagcagggggtttcacagcagccactgtctgactggcttgctcctgcatttagcccactctgatccattccccgcaaagcaagcagactgcatttcacctctcagtcaggtctcagtccttgcccagaactctctaggattttaggcttaactcagaatatagtccacatccttaccaaggcctgcttagcccggcatgctgtggccctggctgtctttctgaactcacttcctccctactctctacctctcctccttcatcccagttacgccatgccccagatgtgccaagcatgctcctaaagtcagggcctctacacccaaggccccttgtgcccagaatgttttctccccaaaacctcagggctccttccctcacttcttccgggtgtctgcttataccacgtaatcgcagagtttgtcttaagaacgacccacacacattcctttaattctcattctctgctgtgtttttcttcctacatgttgtgtctttatttgttgcctgtctctcctctctagattgtaagttccaggggagcagtttgtatccacagctatgaccccatctgtgaattactgagcacctattctgggccatgcaccagaacacaaagatgaataagacttggtccctgtgttcacagagctcacagccaggtggagagagagccttgtcaatacagtgtatgttatgctatgatgcagagaacacagggcttcttgcaggggaggctgtggtgaaggggagagctactgggagagccctgggggcgggcatgcctgatctgagtcttaaaggggatggacagacgttcaccagttagaagagtagcccaaaaagaagcaaaataggcaacggcacagaggcatgtgaacctagtgctgccatcttggatgcatgcgggagaagagaaaggggaggctgaggaacaagcagaaccaggcctagaagggcaggctttgagcgtaacatcccaggcttagcctcatgcctggagctgcgaggaaggtcaaagagcaagtgagagccaggactcagatttaactcttaagtggcttcaagtctatatgctcagaacggtgcccggcaggtagtgagcactcagcggtgggtgttgctctcatcatcttcctcatgcttcctctctagcccctcaggtgcggaaattaagtcccagtgaaaggaagtgagtagctggcccagggtcaaaggcccactagaatcagtctgctcatcgtgtgggggaaggatttgggctaggaggagggaaatcaaggaaggaatgaggtgccaagcttcagatgcccccacaaggcagcaagtgtgaggggtggaggggggattcctttgaagtccagtgttgtgctcttaaaatccatgcgtattttgcctatttgaactggattccagggaaggaaagagggaatgatggtgtattcctgagggagggtgctaagggagttgggacattcagggaggagagaggtttggtgggattggctgggagcagcagtcagggcaccgggacaggcaagttggagcctgagaggcctccaatcccaaagtaaggatgaacccaatcccaagcttcccacatggaccagtggagaaccacagtagtttcctggccaaggaatggcctggaagaccagtgctttccagaattgactctgtaagcagactcagtgggataagcggaggcagagaggccagttggagacccttggaaagcccttcaagtgagagcatgaggcttggatctagacaggccagagaggatgcacctaagagacagtttgcaggagaggcagcatttcatggagtccagcaaggagcgaagcgaaggagggccgggggggaatcaaatgagccttacttctgtgagcgggtgccaacttggttttcccataccaaagtttggggtggtgccaaatttaggcatgcctcacaggcattctctgcacacttgctcccttctgacgccacacctaccctgttccatcccattgcccacagggttaagaggagtgccacctacagggtatctcttggcagacacctggtgtcaccaaggcctgtgagctgagccccacaaggggtctggacagtcctccagggccagggccctgggagcttgctggagtcaggtgggcaggaaggttctgataggttagctgagcagcctcattaaagattgaggtggggaagcccacttgatggctggaaggcgtatcagttacccactgcaccagccaggcgacagaggagaagaggtaagtggcccagtacgagaggtgcccccggcctgtgccgcggagccctgcccgtgatggtcagcagggagtgggccttccactgcttttgcttctgccactgggactgcaccgtgctttgcagagtgagctgtaggtggtgggagcccctctctctcctccctgctcctcatgggcctctcctttcactcccacctgctccgggggtcggggtgggagtgctggatcttggggcgagtatctgccactgaccaattacagggtttgcaatgacatccttgcggaagcggcagggtggaagcagcagctgggtactgggaggcctgagcttctgttccagcagcaccgttcactggaggcacatgacctcgggtagcttttccgagcctcagtttccccacctataaaatagggttaataagcccagccatggatgattggagagattagtcacaaaaaaaaaaacaatgcagttatgctcagtaaaccattaagcattaagatgtggcagatttttattgctatttgttctgtttgaggttcattttaaggttagttttgtgtcctgaaataagcatattaggaagacagaaagaatattctgcagggaaaacaactcccctaaggaacacagcctagtgggcccaaacagtgggggtggggtgtcctggcctggaagctggagactgggtctagccctcctttccccattgtgaatgtgagcttgggcaagcccctgccctttccctgggcctcgggacccctctacacaaggggtgcttctcgccggtacatgcgcagcaccaggccccctgctgtcctttgtcagaactcaagcgcttttcctctccagtgtctccttgttagtgcatgactgcaagggctgggtgcttcccactgtggccctggtcagtcccccactctctgaagtgccatccccacatctgtaagtgatgaccttctaacttgacaggtctttcagaccctgagcgcctagacacagctttacctattggtcaccatggagctgagctgtctctgctaagcccagggccagggcttaggtaggagggtctgttgcaggatttcagtgggtcagttggctctggtaatctgagtaagacatgtcagcctgcttgagcctaaattcatgtggtaagaactcagcagaaaagactagaaaattcacgccgggttcctttaagcaagcaactaagctgtctaagctcgtgttagaatggggagggtgacaatcaggtatttgtctcctcctgagctgagctcggaggatagggttcaacactagctgcctttgtttcccaaagacaaatgcagagctgtttgtttattaatcagtgctgagcatcagtgcactggggtggacagagccctgggccgggagacatttgtcgtgggctctggtcccagctctgccaccaattcttgtatggccttggccaggtgacggtaaagatagtggccagaccaagcttagcccagttcacagactccattctcgcttagacacttgctcgcttggtgataggaatggcacctgtgaggaaagcagggccttgtaacaagagggaaaggtgtgccggggatggcccagtctcactgtaaaatgaggggaccctctggaaagagggaaaggagccagccagaaagatggcagagcagggaggaggccttagaagaacttgggactctgcccagctcagaccaggtggctgtcgtttgttggccagaaattccatcaagcatcactgagcaagtgctggatcctttgtctctggcacccctgacatctccggttctatcttttcaggagccccagggagacttcccatagagactaactggaaactgagcccatcccttccatcccagaggagctgggggctggtctcccagagcctcataaatgttcaggggtggccaagaggaaggccttcttcaggaggaggggtcagtagttcctcgccttgtctgcctgcctttggctgtataaattaatgcattacctcagacaggagccacaccgctccctgcctaccccgcgcccaccatacctcgcggaggatggatcgcagagcagggattctcctccgtagggtctcttagacatttatttgtttagaggtagtgcatgatttggaaattcagagagaggaatataagcccacaatcccgagatagccactgtgaacattttagtatatttcctcctttgtcctttagagttgtagaaatttggagctgatgatccttggttccacgcttctcactttatagaaaatggaagtccagagaggagagagactcccacacacctaacttactggcagagctccagcacagttcactctgaaggggattcgtacaatccagaaccgtccagaagagcacagccaaggcgggaagggactggaagacaggacggggaccaagggaggcctggaggggagtgcaccagggctgccaggccagcacagagagacggtctttgtggtcctgacagaccactgggggcagtcctggcaagacagatttcaccctttgggaagaagactttgccagtgagaaccacccaccccagctagggcctcgcacttgaggtcagaccgggtggctcctaaggctctctgtacagccctgagaacctgtccagctcctgggatacctctcccggtgccacgtggatgggcattgaggcagcaaggccattgggtgctggcaatgtgccacactcctgcccaagaaggggctccgccagggggctccgagccgcagcttctcacactcgcaccagggctgggctccccttcttgctctccctgtctctgtgccccgcttgacccttcttcctccatgtgtcctatccccctgcagtcttggtgactctgtggagggctttagagtcctctcttttggggttgaagcctggcttaactgttgactgttcagaggccacaaagatgctacttcagttttccaactctccagctttcttacgggtaaagtggagctcacagcaggattcctaggacgagggaggctaaacgaggtggtgtctgagtctctggcacaggatctagtacgtagtgtaatacacactcaataaacttgagttctctccttaccccaactcattgtattttctaagtgccactgccactggtggcctatggtgtgtcactcactgatagctcgtgaggcccagtcctcagctcagccactgtttcctgctctgggagcttataagccattagacttctgctattttctctaagactgtgtcactcgctctaggctcgcccagtggctggagatgctcagtttgcctggggccagtcatccacgtacttaacaaatatgtattgcattgactataggtcaaaaactatggtaagtactgggaatacagaggtgagcaaaacagttatgtccatggagttaaagtcaggctgttctgttggccacgctcttcctcctgcccttcctggtatgtgcaagcatatgtcatggatcctggtgaactcggactcacattcagagtcccatgagcaggtgctctcctacacctgggccacgcctgaccgcccgagtctcagcaggctatgaggaagtgggaggggaggagtgtcacctgcatctggctcattctccgtgaagcccataatgcgtgcccagattttccctcttctgtgctctccctacccctttccactacactaggacagctttcttgaagatggcagtaccttgctttggaatcctttgtcaaatccttatgtcagagagagatgctataaaagccttttgaaaaggtacaatacaaggaccatgtataagctcatctcctccttggagcagcctgtgaagggcacatggcaattcttcatgtccctgcttgcagaatagcagcaaaggggagtgaccgccaaacgcctgtagtgtgtcccaggtagagatgctgccagacgggagcccgcctcttgcagtgctcactctccccagtgagaagggactcggacctcctggccccactccccatcagtcatatagactctgccctgagtctgtcagctcctgtcccctgtggctggccccctcaccccacctcaccacccctccctttcaggagggctcatggctgagtctggcccagccttccctcccctcttgtgtgtttctccccagctcatggctcctaagagtaaaagggctcctctgactcaccactgtgtttgggaggagtgggtgtttgatggaacttagactcgaagctggaaagtgggcctccaagacagcaagaagtcagctccttcccaagaatcatcacagtccagcgggccctggagcaggccagcctggacttgagccttggctgggtctcagcctctgtcctcctgcagctctttgtgttcagagaagaggtcagccagggaacctatggcccgtcctgctaccagtggtgagccctgccaccaagggctggacccacatgacaccatgaatgcccagccaccctgctcttgtttgatgttggacctgaaatttccctttctctttttcatttgtctgtggcatgatgggttcttttatttttccttttttaatttttgaatttcttctcatgcttgtttcctatctcatcctctttattttgacttgacaaaatttgtctgagatgaatgagaagagggtgagagttttcttagttggagtcccaggtgaatgggccaggcccctgcctcggcaaaatcagctcccagactcaacaagcttgggacactggggccagcgtcacaaaccctgtggctctgggcaagtcccctcacccctgagaaccaccaccactcatcccgtatacttcagggggccgtggtggaaccagctgggcagtgagtgcacgcagcctgtggagaagaaagcgctccaccgaggggaccacaccagcaaggcttggggggcagagggccacttaagccagcacataggcaggttcccgtccaactcagcagaaagatcaacagtgtgctttcaacagtaatgcgaacaaatatttccagcactttatggattaccatgtggtttttactcctagagtttgtttattcctcaccgcagcttggtgaggtaccactgttagcgttagtgtattaggactcccattttacagatgagggcacagcagcttgcctaggggtgcatgactaggcagatgtgaggcagaacttaggccaggtcctctcgtgcccactgcctgcccaggttagtacctcatgggaacaagacaattaagatgtgatccgcagaccatcgttgccatacattcactgtacaaaggagggcacctcatggccacagaaggtgactctgcgctctgccactgtgtgcagagccacagggtcctctagcagaaaggcatctgaaactcacagccctgagaaaaaggctgggtcagcagctctgtgactttagtttgtccctaaggcctctggtcagcagagggtacctggtgctggcagggcatcgttacactgctgcatcctctctggacaagcatgaacttgggggaccccttctaatccctatatctccgtggctcacctcctaggtttttcttttcactcaagtcagttcagcatgactccttcacctgaacttttccccaagggtgagtgagcttgagccccctctccccttcctgacttagttcagtggaatatgaactaagtgtctgatgcgagccaggctatgagcgtggagtgcggagtgagacgtgctctctgcctgcaagaagcccagggtctagtacagaaaagaaggcagctcccaaattactggaatatgggtgagaaagctgtcagtttttaagagaggcgcatgggcaccggttggtgagaaggagcatgaggacctggggagggcttcatggaagaggtgaccactgagctgggcctggaagccttgcttggtggagacggcaggaaaaggtgacccacatgggttgagtagcgcacaaaacacagagagacaggaagcatggtggggccgggcccagtgtccaggtgcaggaggtcagctatggaggactgtcggggaggcgcagccacaaggtggcctggggcctaggctgaaaccttgaatcttattcaatggagcctggacccaaccctgtgcaggtcatgtctgtgtttcccagacatcacttaggccacactgtcagaatgagagagagtggaggtgagggtccaagagagagacgccaaggctgccaggtggcagcagagaagcagggtgttttgtggggcagccgacacagcaccaacaagactccgttacctaacgagccgtgggaggcagagagggaagagctgggactcccaccatccccatcgccctgactcctgtggaatccaagctcagctcgggcgacgagaggtggctccaaggtgctcatctgcagcacgggacaggtgccacatcctccgccttggcttctgcctgcatcacgcagggaagtcatgtgtagtgcctcaccactagacacgagggagtctgattactagcagccaggagccttccttagctactcctcccactgaacaagcacctgccaaggggctgctgcttggagcttcccaagggccaccagcagtctgcagcaatgaccttccctgtccctccccccgactgccacggggaagctgtgccgggggacggaggaggccaggagtaagggggcgatgggaacctcaggtctgtcacagttaccctgggtgacattggacagacccctgcgccttgctgggccttagctcccacccctaaaacaaaaggactgtacttttataatgttcagggccatggtggctcaaaacaattgaacattttcttcgtttaagaagaatggcaagccttacgtaatcagtgcaatcaagtgttatcctttcctgctctgtcgggtctaaaactccagccaatttttaatcaggtcttaggtgcaggggccagagccctctggaagggccagggctcctattagactttcccagcctctggagaaacaggttgggagggtgttgggaggacgtcagcccagcaggcaaaatggggaatccaaagcacacaaccacacaggcctgtgtgtgggcagctggctgccatcggggtcctgacaagggtggaaaacagttacagtgacctgggcaaggccagaccacagacacagaaggatcttgcgacagctggtggagcccaagcgtggaaaggcctccatcctagggcagggccaaccctcagaccaaatgctagacagggtcgctgggacagggactcagctcccagaaggacaaaatccagatccaggagtgaactcagccgttgagacccggtcttagaacaaggcagatgtccagttgtccaagccagagcccaaagcctgtgccaagctcacagcagagcagctcaggtgcaagtcccggacgtggagctgaaacgccaggaatccctcccgcctcagccaggatgagtggcagtcagggggcggggggacacatgcccacagcaccttgcacaccatccaagggcagcttatgagtctgccacattcatccttctttcttcaagctggtctcaatctgacaccactgtctgattgagtttaagaaagaacgtggcatttgcagttggtttgcatctgccacttgctgtatgtaagaccttgggcaagccatttagcctttctgggcctggcttcccagctgttacaagtccttatgggagccttcttatagggctgtgagaattagagttaaatttaacattaaattttaaaaagtgcctggacgttgctctggtaataatgttcacatattcattccttctgtttcttgagaacaaggagggaagaaccactaagaccttggtcctctatgaagtaggagggaacagggctgtccccacatcatcagtgcagttgtaacttgaatattgctgtgaccccatcctgcggcagaaacaaagccacttccccatcttgtcagggaggtatgagagcagcctgcccagagtccctctcccagtcactgcgactctctgcagttccctagtgacacctgagctggcagagaaggaacagtcagctctttcttaggtggcggcagaagcttaactgtggcacagcatgggaagccctgcacaggccccagctccagcctcctctgaacaggaggtctgcacagcagacttcgcctatgccggggtccctccttcagggtccagggcagggtgtggccagaaagttccacaccagtctagaacaaggggagcaagggcagggtctggctccttcccacccgcagctccagacaccctttgtagacagcaggggtcaccccaggtctagaagcataggcctcagctcagacacacccaggttttaactctgaccaagacatccgccagctgtcagtgtcagtcctttgctcagaaagtggaatcaagtggacttgttaggtttggcaattcccagttccccgctgattttaattagaacatcctggtgggatgtaaagaggccagattcaatgttaaagggttgagggggtggtggccagcaagaaggtcgaagcagtgagaagatagtttgagagagaaggcgagcagggtcagtaactgaaagggttaatttttaaccatgtgaaagtttgggtctcatttattggttcagaatgaagagccgtgagagagagagggtgattgagagaggagatggagtgagtgatgcacaggtgtgagtgaggccaacatttaaaaagattcttaaggatgtctcttctgcagccagaaggtgggcagagatagagagcactccagttgggtttgctggggcctttcttcctctaaccacactgtttctgtgcttctctgcccacaggcccctccagccagcgtcaggtgcagaatggcccctctcctgatgagatggacatccagagaaggtaacccagcacccgcaggggccaggctggtcatctcccaatcaggctgggtggccaggggtgccttcagcgggtgaggatgcaccagcagccaaggccaggactcctagaggcatacactgcgggagggtgcaaggtgcaagccagaccaggaagaaagagggggccgatgcgcagccgctggtcccggacaccaagaccaggaatgactgtgggagtctggcattctacagagagtgctgctgacctccagcgggacggctctcagggtgacccagcagggcccaagtgctgctcccttgttgcctcacttgcccttccccaacgtagcaggaggcagtccaggcatgagggattcagcctgttggggcagtcacgcccatgggatggggctagggaccataggaatgaaccccctcaccccatggagcttctaaagtgttaccacagtggggaagaggaagggccaaggctgttgtcccgaaattacagagtcgtggtgagtccccatggagcagcctcccaaggtcacattgctctgaaatggcagagtcaggacttgaacccaggtctgccctctcagcgatgggtcctctgcctcttctgtgtcgagggaggtagggcctggcccgggccttcctcactcagctttgtcagatagggagtcaagctgcagctctctgtggctacacttatgtccagccctggactaggagtcaggaaagccggcttctgcccccacctacccctctcaccaaatggcatacggacttctcccaagacctcctctcctctggccttttcctaagactgagaaatgaatgccttgcaaccttgggcaagttcctgctccaagcctccgtttcccggtttgaagatggtgttggctttgctccccacctgtctcacccactcaccctcagggcttttcttactgttgtccccatgagccagctgaagccgagaatggaagtgacttgcccagagtaaccagagagtcaggcagaacctagactggcagtcaagtctcactccagctgcagctccctgccgggacccaaggctggtcccacccacaaaagggcgtgaaggagtgagccaccagacgccaggtgtaagcgtacaggcgtggatggctaaatgggtacttcatttctctcgaaactgcttcatcacccgcagtgctgaattctgtaccccagggcccaatccaagctgtgtggggtcactggccgtccgggaatgggcataccgcctggcggtcggggtgtgaacagcaggggacacacacacaagcacatacacttgtcccaaggcaggaccacacacatagctgcccccagacgagaccacgtacggacggacacacacacctgctgcaagacgagaccacacacatgcgcacacacacacacctgccccaagatgagaccacatgtggatagacacacacacacacacctgctccacggtgggaccacacacagacacagacacacacacctgccccaaggcgggaccacacacacacacacacacacacacacacacctgccccaaggcaggaatacacacacacacacacacacacacacctgccccaagacgggatcacacacaaagacacacacacacctgccccaaggcaggaatacacacacacacacacacacacacacacacacacacacacggcggggagactctcgcttgtcccacgcaactttactggaggtgggcaggggcaagacttactcagtgacgcagagactccaagcatccaaacagtaccataggttcagacctgacttgagtatttttcacacatcctcattttaccatggtgttctaggtgtgtggctcctgctggggaggtttcagcagtttgagcagagacactaatgtagatgctgctgggagcttttcagaccttaatgctaaaaggggcttttccgtaatttttttttttttttgagatggagtcttgctctgtcacccgggctggagtgtagtgacgcaatcttggctaactgcaacctccacttcctgggttcaagagattcttctgcctcagccccttgagtagctgggattacaggcgcgcgccaccacacccagctcatttttgtatttttagtagagatggggtttcaccatgttggtcaggctggtctcaaactcctggcctcgtcatccgcccgcctcaccctcccaaagtgctgtgattacaggcgtgagccaccatgcccagccattccataatgttttagttaaggcatacaccctacaagaaccccatgaaatagatgtttctggcactcccaccaagcccagagctgccttcagaacaatccttagccctgtgtttccacagcacatgttcagtttgcaccacacgagctgagctcttgatgctgtctgtggcctggatgatttcttaaagtgcctcccactccagaactcgatccctggattctggagatgtatctgggcctcagtgtcctcactcagcttgcctttaagagcaccctgaggccaccctgccataaggcactgggatgtgagttcccactgctgtgcacgtagcagtgtgccacggtgcaccaaatggccctctagacgaaggcgggcctatgaccgctcagtggtaaagaaaatgaggagtgtggcctttgtgtccatttctgctggcaaccaaaacacacctgagaactgtcccaggaagcttggccaggtccactaagaacaggcgttcctgaggctgggtctgttgaggccacaggctcccaaaagccaggtgcgcccatctagcccagggaagagcttggtcactctggggagtggaatcacactggccttccataaggagctctgtgttcagtgtgcctgagactcaggagacagccggtgctcccacttgcgggagctggacccagtcacatccccctcctctgttaagtggaggcagccgtggcacacagtggcgcttgtggagcgctggcgaaacctgactctgaagccggggccggcgggtacagcacaggcacagagtgtggtggtctccagagtggaggagtcagactgccctgctgtgattactttccagacaagtgatggagcagcaccagcagcagcgtcaggaatctctagaaagaagaacctcggccacaggtgagagccctcctcccctagggccgactcccatgctgctgccaggtggcagcccctccacgtagatgaggcccagggacacacggggcgctctgtgagcagctatggggagcctaggtctcaaagtgcaaccaccacttcagatggtgagggtagcaagagagcagagcagaggcttggggagtctgctcagctgggtctggccactacctgccaaccttctccggagtggacattcagcaagcacctcctgtgtctcaggcaccgtgctaagggctggggacacaactatgactgcagatgcagttcctgccctcaggaagcccgctgtccactcaaggagacagtgaacccacccttgtcatgtcacgtagtgaacactgtggcaagtgacgtgcaggtgctgaaggcctaccttgggtcaggaagacttcccacaggaggcgctgccacgcgtctgtcttggacgttcggtggagcttagcacgttaaaggagaaggacgagggttttccagaaattgtcatgttcactgataggcaaaggactggataatttaccaagtgctttcatgtcctttgtcttgtttaattttctcaaacaccctatgaagtgagcaggtgactattatcctgttgactgatgagaaacccgagcccccactggttacaggaacgctctgctcgtgagatgctggctgaccccatcacccccacctagctgctgctggcctcctgctccccggccagtctgcatttctgatgcaggtctgacactgtcatcatgtcgtcccttccccatcactcttggaacagcctgtgcctgccctctctccctctagtgcctcgcaagcacttcccatccttttcctccttcctcacacttgcctccccccttcacctaactgaacccctgctctccggtcgtgtcccagctccacagtcacttccgtgaggacgtcatggaggacgtccgtcttccatgaacttctggccaggctggagcccctctttgtatgccaacatggcgccgtgtgcctgcccttggtaacacttgtcagcttgccacagtcctccatctgcgtttacctctgcgattcgttgactgttcctcataggctgtgagcaccctgagcagagagcttgtggctggttttcctcagcaccatacccagcacctagcacagtgcctggcacaaaacaggcttaggcagcactggcggaaggggctggatggatgatgctggagcccagcactcggcattgcgccctgacccatgcccccagtcggccctgggacccacaggacctgccacggcccccaacgacccaagtgtcagtcacagttggatcttggtgaccaacttctgcctagggggtgctaggtgcttagaaggagcagagaagagaagaggcacagactgtaaccagacagcttcctctccccctggaaaaacatgattggagcaagaggaaattgcctgggctcaaggaatgttaagcaaatagaggacacctgtgggtccagccaggccccggagtactgaggacaccagaatagggaataattgtgccagagccaagttcatcccgcggaggcttcctggatgaagcaggcctggagctgtttctcatccctttggggagcagcctgcccctgtccttcctccggggaacctgagctgagagcagcaggcttggcccccagctgggtgctggagctggctgagcctcactgttgtgtttcagggcccatcctcccaccaggacatccttcatctgcagccagcgcccccgtctcatgtagtgggcctccaccgccccccccacccccagtcccacctccacccactggggctaccccacctcccccacccccactgccagccggaggagcccaggggtccagccacgacgagagctccatgtcaggactggccgctgccatagctggggccaagctgagaagagtccaacgggtaagagctcctgtgtgcggggtgggaatgggaccgaggggacccttgtgccatctgcagagcgcttgtgttccttcccgcatctgcgagacacagcaaactgcttccctgcccaaagctagctggcccttggccacttgttctcaaacgagaaatcacatgggacagcactttgaaattatgaagttagcctttgagcctcacgttgaccttcacacgtggggcaagaactatgtccccctttagagatgaggaaattgaagcacaaagagcacgagtaatttgctcaagtcacaccgtttacaaattgcagattttggactcaagcctgggtctcctgaatctatgtccattgccctttccactgtaggaagctgtatgctggcaactaggtccacccggctgtttcttccctaacccttgctcatatgttctagaactgtgcttgtaagaatagctctaatacagacctttggcttacattgtgtttccttcccacaggatagtctcttctcccctccctccctccctccatgtgtcatggctggtcttggcaaagacactaaccatgagtctgcaggcctggggagtgtctgcgacttgtgtgacctgggctggtccttgtccctctctcgattctggttttctcccctgtggggttggagaataatggaccagatggcccctgaggccccttgcagtgctgctgccataggattcacacgcacacagtcccctgcatcccctcacatcgttgctgctcctgttctgccatcagcagcagaatctaaaacgcggcctcctttttcctcagccagaagacgcatctggaggctccagtcccagtgggacctcaaagtccgatgccaaccgggcaagcagcgggggtggcggaggaggcctcatggaggaaatgaacaaactgctggccaagaggtgggtctctacacctcccgagacttggtgtgcctagcaggaagctcctgcccccgcccccagcgctgcacagagaatcctctcttgaccccagaatctttgttccctgggtttagccaagcaggggaaactgttacttaagttttcccttcccaaggggttagtctgaagcgcaagcccacaggagtcctctaaactccagatccttcattttagctcagcaaatatttcctgaagcatctaccatgtaccagccctgtcctgagcagagataaatgtggagacaatttcagagataaatgcgggaaaaagaacagtccttgctcttaagatcctaacagaaataagatgtggccgcagtggtcgagtttgcagaggacactctggtgaatgtgtggtgaaggcaccccattctccagggttctttatggaggactcaggagaaggagttatgaagggtaggagcccagagggcattgccctgagcgacggagagagagtagttccatctacatcccggccgggctcttgggcctgagacctggccatgtgtgtctgctcgctgcagcgggtgtggctgcagcctgccattgtggctctccgctgttccccaaatgaaacccgagcagatggggagatcgtccaggtctttctcaaaagggatgcaaagcttggattttatttttaaatatgacttggcatcaggaatgtgctcaccttggactaccaatatcgtggctcacttaggcaccagagggcacgggagtaggcctcacctgccagaacagaggaagctgcagcgggggccctgctcccttggtaaccccacctccaccccctgccactttgtcgccttctcctggccctcccagctgccttccaattggctgacccaagtgagaactctgtgtgcccagggtcttcacactgcagtcctagttcctctcattaccttcccgtggctccatgaggatgatgcgagatgacagaggcccacagctgcaggcagctggtgtggcgcttcatggcagggccacagcctgggtttcctgccaaggggctctttgcttgcatcacagatggcagggaggggaggctccccgtgtgtcagggagcagcaaggtggatccgcagcacgggcgtctccggagcctctactgggcctgggcgtttgtacatcgccaagacaggaggcaggcttctgagcagtttcctgtgagagtaagtccaggtgtgtggggcttacagtggccacacaaaggcgaatggctccgtgggtgagagagccgggagggctcgcagaacgatgaggacgtcccgtgctgtaagagggacagtgggcagagttaaggtaaggctgggaaggctgacgccccctgtgcctggagagctaggtgtggaggaaatggaccaaaagtcaggctggaagagggagcctcctggtgcagggcatcgggttccacctcagagcactcagaggcgaggatgggccacagagaaatagaaatagttttggaaaagaaaatatgaatgctttccctaagtcctagaccaagctgaggggaagcacctttctgtctgagaacaggaaaaggccagtattgccaggagccagtgagatgccagatgccggtgggagagtcaaggccctcccaagaacaaacatgctttgcatagctcagcagggatcaatcaggtgctctctgaaatccacctcagtgatggctactgggtggagccgacgatgaaagtgcccttgccaggtttcttttcatgtaggttgtctcccgcctctgagggcatgcagttgagtctcccaacagtggagggcaggagggaaatgaacgtggacagaaagctcctgttcagcagcactttcacagacactcatcccgcctacactccccgtgagcaggtggcttggtcagcgttctgtttctaggagatgggacactggctgctggggggtagctggtgaggtgtaagtgatcgtggctaggccagttaggagactctgacagtccaggaagagatgataggggcatgcaggaaggtgttgaaggtgaagacaaaaaagacaggcaggtacccagatttagagaactgaccaggctgacagttataagaagctggtgtcagggatgattccctggtttctgggctgagggacgaggtgggcagacctgtcctgagatgggagctaaagaagggggcccctgctgtagctgaggaggctgccaggtaggcccatcacagacaggtgacagcctggccacggcccattatcacacctcagaccagctccatgcttgatgggcagctcatctcaagttgaaaagccacagaagcgtatctctgggaaacactgagggtctgcctgcctctgtagacctgggaggtcagcagataccactgaggccaaaaaatatgggtgaggttttagagtacatgaaacggggattcatactggggaggtgcacgaaccgactcaagggcgtcacgtggacctattccagggctcctcttctgagcatttccaggctctgagtggcattctagattggggagggcgtggctgggttaactgagttccaagacacaagggccttagagtgacacaagaaagtgtccagtgtcccgacctgtgggacagactgcagcccagagaggtgcctctctgtcccgtgtggccaggccttcagtgtcctggggacagagcgtgcccgcctcccctccacgcctcagatgctacagctgctgccagtagagctaaacagacatagaggcatctcgccctctctgcctagaccagttttgtgtcccaggccatgaccacacggagggcctggacatttgcctgggcctggctcctcaccagacggggcctagacaagccgcctccttcacgccatcgttttcccacacaggtttatctgaggaccggggtgagtctggcagggtggaggcagaagagttctgggacagtgagagaacgtgaggagctgatctgtatcttccccttctctgtgcctaggagaaaagcagcctcccagtcagacaagccagccgagaagaaggaagatgaaagccaaatggtgagcaagcagcccgccccaccctcaggctccccactgagatgagcgcatcgccagggaggctctctggtctcaggcgaggcctttgggacatgcgtgggatgggcgcttcatcaggtgattcacaggaggggcggagggtctctgcggtgcttgtccctgcgccaccctggccccagcagcaggcctgccctcactgagcaccccctaccagacactgctccacccttggagctgcagcctgaggcgctggccgctgcaccgcagggctacctcgccttcccaggagccccggggagcacagaccagccagggtctcggcgggactgggactccaggagtacactgcagaggggcacgtctgccagaagcccagagaggtttttattttcaaattatttccgtttctaaagactcctcttccagcaggagcttcaggtgagctgtggcaaaggagccctggacccctggctcttgtccttaccaggcagcccagagccagcctggctgccagagctcccaacatctgcttccagttagggcggctaattctcttttcctccatgttaagcttttcctataaaaagactcctactgacagggctaagtttagccttaactacaaatgccttgaaggttccacctcagtgcagaatcagagaggaaataaaactgccagggaccagagcaggcttcctgccctgtcctcccatcagtcagggtcatgctggtgttaccctgaggctatagccctcccagctgatccacgcctctcagccccgtcctgggcacatatgggtccctttgccccaccagccaactcccattcagcctgcacttccctgcatcacccttacaccttaaaaaacagcctcccggccggctcaacacttcacacttgtagtcccagcactttgggaggccgaggcagacggatcacctgaggtcaggagtttgagaccagcctggccaacatagtgaaacgtcatctctactaaaaatacaaaattagcggggcatggtggcgcatgcctgtaatcccagctactcgggaggctgaggcaggagaattgcttgaacctgggaggcggaggttgtagtgagcagagatcgcaccattgcactccagcctgggcaacaagaacgagactccgtctcaaaaacaaaacaaacaacaacaacaaaaaaacagcctcccgacccccaggcctcacaaagctcctcactacttgatcccagccccggtcttctcccgaggccctctgcacaggcacgactgcttgtggagactcgttgtctcctgccagatcttaggcccttggagggcgaggcctgggcttctcacacgtccaccattcccataccttgcacatgctgtggagtttagccaactgacttgccatgaatttctgaaattgcaggccacgggataatcacagacatcaaaatactgtggcctcgctccagccacagccctggggatctgaagacatcgctggcctttcttagtcaggtgccagtatgttgcagtcccagcccctgaaaactaaaactctcgctcctggagctctaagaagaatggatttcaaagcccaggggcttctggaagaggaacattcttgaaaccttcaaccccaaggatagcactctcctcctcagacccccatcttttctgtcttgtttttcacaggcccctggctacagctggttcttgtttgccatggtcccttctcatacccaggactagcgtctaaagagagcagggccttcagaagatccacacaccacacaagtgcagtgggagggagagaggctgatggccggcactcgttttcttgttcatgcttcctggtatttccccaattctctgcagtgaacatgcactaagtttatcattaacagagaagaaagaaggcttatttgaaagacgaaaagagccccaaatgtggagtccggtgacttgggcaggccctctgccatggcagagctggccctgggccaatggagttactgctccgaggaccagttccaccacctgaaaacctgcacccaggcatggccgcctcacagactgtgcgactgccagaggtggggtgcaagtctctgtgcccagggcctgggagtgctgcggccacctctttcccagcctagagtcaaagcataacttcccttttaagcagggagggttttaaaaaaataacatacaagaaaagatgataattttttagtgactctgatgtcaccctgtatcgctttcatcgtggcccccacatgtgtgtgttgattgacataatctgttattcagctgtctttaaaatgaggaggcctgagaacctcatcccagcacctgcaggctggcacctgcttttgcctctcgaccagagcctcccgggacttactcgttcaccacacagatacgcagggcgttcctgattctcgtgtggggatgtagtgagcagaggagacaaagcaaagacctctgcccacggtgacaagggagaggttctttgcttcagatcagaatgacacatcaggttgggtggccgcctgtcaacagctcaaatgctgtgcattctgcttcatcaagtggaaggattactcttattacttaatcagtggcatgttcctgatgctgaaaaaccatcctgacgcacatgccatgcatgatgagtgttaggtgtccccactgctggatgaacacgtccactgttcgagcactgccacagacctattacacgggcaggtgtgtgtgctgcacagggggagcaggccagtccacggggtgctcatgagaagtcagtgagatgacatacgggaggcatccggcccaaggggggctcagggcttgcgggtgttgagggccagaaggaagttctatatcaccctgctgagagcctgtagctccctgtagccttccccttccccagctttgtccactggctcgattctctccccactgagattttgcgttttcacttttaaatatttaatgttttgctaattataaaagtcatatgtgttcattgggaacatttggaaaactgaggttttatgaagtgtccaatgatgtcctgccctggccccaggtggccttcctaaacagactcccttcttctccattttaggaagatcctagtacctccccctctccggggacccgagcagccagccagccacctaactcctcaggtgagagggcgccccccgctgaccccagtgaggcatgaggtctcagagtgggaggggggacccttcggacaggaccctctgatccagcctctttagtatgcctgagcagagggccaggccacagggaagcccatttcttatgggtccccaggagcccatgtgggagcacaggaagtgctagagcagagccactgtgatgggtccccagggtgacctgcgtgtcaccttcccaccaggaccctgagtcccgcacgagagaaggcacttgcctgacggcacatattcagggtgggagtttgtgtccagggctcctgaggcaggctggggccagtgctcttaagaggtatcagtgtcaggactcatgtctcccagtgaaacgccagctgatgaccgacattacagagatggcagtagatctcgctccacccaaaacgcagccccttccctggctcaggtttctctctgtctaagctgtggcagatgggaggtagttaggagagtatgatgaggcttcgcaggggaggaagaccccagggttggttgttcattcgacaaacatctttgcagcacctgctctgtgccaggcctgtgctcatgagcacagcgaggagagacaggggcatcaggctgccctagctgggcagaggaggctcttgccagctgttcgcgtgtgtctctggggcatgctcaggttgggtgtcgcctccctgtgaaactgcacgccatgtcctctcctcctaagatttttgcctggtgtcttgatttgccaggatgcataggttcctggctgatgaacgtgatcaatacccctgccctgtttgcttcttccaacagcccagtgagtgggctacgtggttcccatctgtgtgcaaagtggtttgctcaaggccacacacctgggacatgtctgtagccccaggtctagtgcctgcaggcccagcgcctgtcccagaaggtggctttgaggaaaactgcctcaatcccaccgttggtccgcagggtgccaaggcttagctctgggccaggcagctgccccactacccctagagattttgtcttctgcctctgcttgtcctgcaaagtcaacgaattcaagttaatgcaacaaatcttttggagtagaacaaaatataatccaataccacttaaaaaagacaagccagccagaatgggacagagccaggcgcagcatgggaggcagactaaggagcccctcagtagcaggtgccgggccgaggggcctggccgccacaccacacgtgggagcaaggctgtgctgggatgtccggggaggtcgtgcttgctcgccctgtggctctagtcactgggtcccttaccagcaggctcacattccagagagacctggcacagtgaagggctcagaaccagatcacaggtcagggtcaacctgacctaggccatgggggactgagaacaaggtgccaggttttggcttaactcaatcagaccttcctgccacggggctctgcacccttggcatgggtgagggcttcctgttggggtgtttaggggattggggtggctactgagtcccttcacctgtgaggttcttcatccatgaaatgaactgacagaggctggccggaagccctgggagcggagcaactcggtggagaagcctgtgtcctcgattctgtccaggtgagctgccccaggaaggcctgagcagcgaggctggtggggcagaggcgggcgctggcgccgattcacatgtctgtttcattccattgccgtagaaccccgtctgtggcaaagagccccgaagctaagagcccccttcagtcgcagcctcactctaggtaccgaacaaccctcctgctcacatgtcccccagggtttggggctcctctgtcccccgtcccgtgactaacacccttgcacgctgtctcacgtcctggcatttaacaacttgctctgcgaaggtggtctgttctttcagacccaggacctcggggtcctgtcagtcagctgctccgtcttttccctctgagagagagaccaagggcaaggagggcagtgacctgtccacagaggtagtgcaggggggggccaacatggagtcccagctctggactcactacgtgtgacagtgggcaagttaggggacctctccaagcctctgttttccccccacaaagtgaggtctgttaacccctgctgcacagggtggtggtggggacagctgtgagcaacagctggacatggggtgtggtcactagccagggctgcaccctacagttcaaccagtcctagcactggcgctgagccctacccctttcctccagcccagagtccttcctctgcggccggcacacagaatcagtttccccacagacatactgaccatatttcccaagccaaaagctggcatgacaacatgatagaatatttggaactgagattgcccaaaaaggcagaggcagccagccacatagtatctggaggtacatgtggcctgaattggaaggcctctagaacctgcgtcaagaatgtctccatcgccaccacaaattgaagggaaaccacccttatcacagagcaggaggcattgaaactggccttgcagagctgaacaggtggtgagagcagagcagtgcaggtggacagagatgaggaagtcttagcagtcagctggggtttgtccaaggcttgtggtcagccaggccgtgtgctggggacagtccctgcctgcaaagagcaccgtgtgaacaaggccactgtggtcctgaggggtgctctggacagggtgcagggccacatggtggaagggacagggtgctttgcggagtggggtggggcaagcctctgtcgggagctggcattttcgttgacccggacgaggaggagtctgctctgcggagatcatggggacagcctcccaagctgaaggaagggtaagtgccagggccctgagcctgcagccacccgccaagctcccccgcacctccacctggaagcagacaggccatggggcaggggaacgggaagggtgaggaagagggtgtgggggagcgcggagttagaagtttgcattgtgttcatgcgcagggcccagtcatggaacttgaggcacagggtgccatggtggaggctgggaaggggaaggcaaccagagtgggcaaaacgagggccctggagcagacacggcagcaaggggagcctgcagcgctcccagcggactccgccacgtcctgctggtggagcaaaggcgggctgccatgttgtgagtggccaagggtcgctcactgggcaggaacattgtcaaggccattcatgcttggaatagggtctctcttcagctctgaggcaaatctgttctctaattttcagatgacttcaaggggaacgtgtaccaccacccctctggtgcgtcacattgcttaggaagcctgctgtgtttatcactgggtggctgtcagggctgagatggagagggccagggcctggcgaggtggagcagtcggcccaggtgtcccagcaattgttgctggaacagggtctggaacccacaggagaggcctgaaggacccagggccctctggctggatgcgtttgcctatcaggacccagaattacttacagacctgtttagggctaggcttggcctctttcttgagctcatctggaggggtgtggcaacactcattcttcatccttattctccctggctgtgggcaacactggtcctcagtgtcaccagatggtcctcctctgtgcccatgacccctcagcagccaaggctggccctgccagataaatgtgtgtgcccatgatcacacccaggggcacaggccacatacgtttccctgaaaccttgggctccagcctccatcccgtccatgtgggagggaacttgggtcccagcagtgtgtctttcagcaccaagtcatgtttaaaagaccagagagacaagcattttgccaagatcttccagggaagatgcatgtgtgacacattaacattcaaatcaggccagcgcggtgctcatgcctgtcatcccagcactttgggaggccgaggcgggaggatcacttgagcccaggacttggagaccagtctgggcaacacagtgagaccccatctctacaaaaagttaaaaaagaaaaaaaaaagggcacatgtctgtagtcccagctactcgggaggctcacttgagcctgggaggttgaggctgcagtgaggcatgatacgcctctgtactccagcctggttgacagagtgagaccctgtctcaaataagtaaaaataaaattcaaatcggttaccttagtttggaaacttttcaaagaagtagtccacgagaactaccttgaaagagcaaaaccagccaggtgcagtggctcacgcccataatcccagcactctgggaggcccaggtgggtggatctcgtgaggtcaggagttcaagaccagcttggccaacatggtgaaaccccatctctgctgaaaatacaaaagttagctgaaaatacaaaagtggcacatgcctgtaatgccagctactggggaggctgaggtaggagaattgcttgaacctgggaggcagaggttgcagtgagccaagattgcgccattgcactccaatctggggaacaagagcaaaactctgtctgaaaaaaaaaaagcgacaccacatgggaggatgtttcttgggggaggtgtgctatgcccgagcaggctccagcaccaggggcgctggtgtgtcaggagcgcgcctccaggccggtgtgaactctgcaacttcacattgtgcctcctgccgccgctgctgcttccccgagccccaagctcaacctggagcatgagctcccaccctgaggaggaggctgtcaatactgtgtttctttccagggaggcaacgggtgggtgcgatgttgtcacttaagttgccacctctgcataagagctctctgatcagaaagcagtttctttgttgaccccagccagccttggctctcgggttgggaaatacagtcacggtatccatggagacctcttgaggtggagacgggcgttaaacccttctcaggcagtctgaggtggccagagtctgaagcaagcagcctctatggagcgaggggagcaggtgggcccagcctgagcggggcctctgcacagccagctttcccccacacctgtctccagccagggcacccacaggccctttctctcccaggatgaagcctgctgggagcgtgaatgacatggccctggatgccttcgacttggaccggatgaagcaggtgagcatgccctgtgcccttccctcaagaggctgagggcagccagcaggcgggggaccgtctctgaccagcatggccaggcaggccctgggggcccacatgtagctgccaaaaggccagtcagggagcagccacggcagaaagggggtgcccaagcctgtcctttgtccccagcccctgccatcaccagaactaggatgtccctcaacctttctgggcacctccctcaggcctgcctctggggctttctgccccgaggaagcccttagtttcagtggcgtctacctgagggaggtggcagcaggattttcccaggcctcccatgccgtcccccctcagcgtgggaagggggccacgaggagacaagggtgacagatgcaactctggagaggcccaggagaccccaagccctttggacatggcccagcccaggccggcttttccgtctccactgcctgtcccttcacctggacactcctctcccaacaggagatcctagaggaggtggtgagagagctccacaaggtgaaggaggagatcatcgacggtgagtgcagccccaccggggagggtggcacccaggtgtggccgcaggacaagggtccctgtcacccaggctgggggcctccagttttgagctggagcccatactgcactgggccctgtgagagatttcattcttaccatctccagttgaggaaacaggctcaggaaagctgaaagctaagtggcttgcctaagaatttgtagctccctggtagcatgacacccgaatctgaccttccacatccccggcaccttcctggaagacccacgtgggaagagcatggaggggagaccccagcatcgttccagagccaggtctggaggagccacctgagctgctgtcattccaccccctggcggtttatactgccttcttgatactgccacctccagtcactggtgttgggcttctgaggtgaccactctgccttcctgggggtacaggaagaccaaggtctacagaagcaccttccaggcttgagctcgttcacagcctgcctggccctgggctggggaacaggcggggagcagcctctggctccagagcagggtgggtctcaatgcatcacatccgtccttccggttcccagcagagcctttgaatgctctgcctcagatctgcagccagaggaaaagggggagtgggcagggcagactcagtctagggacgagctatgcagcacagccagtgccagctccccacgtgcctccccaaccagggtgataaaggctgacacctgggtgtgtagctgggtctggcccccagggcatcacagtgaccggggcaaaagggtcccacaagcgcacaggggtggaggctgatggcagagggaagaggcaggtgggagcccaaagacccaggcctcctcccccagccggcccacccttgtttgagcagagagcactcagttcctgtttgtccagttcccccaaaggcctgggctggggagataaggagttaacaaatgaggggaatgaggcagcctgggcgataggcaggcactcagccaactggtcacaccgccttactgctgggtgccgtctggccccaggcatagctgggtcagaaacccagggcccaccacagcctctccacctgctgtgggtgcagccccaggtggaacccaccctggctgagagcccgggggtaggcatgggccataccaggggctctgagaagcagctcccatcccccagcccccacaaccttctcctggctgttggctcttggcccagcaaggtccatccagagagaggcctgagttgacatagaggagggggagtccgggaggggatggataccagaggaaggagggaaaggcccaaatttgggaggccgggggttggagcactagcttggggtgatgaggaagctggggggaggcaagagaggaccctgcctctcctgaggagtgagcagagccagggcagtccctggggtccagggccaagatttcctgctgacccctgcaggagctgggagggcagagcctcagcctccactatgttgggggaagggctcccgggcccccggcacctggacacccacctgtccagagcctacagagaccctgcgtccccacacagcagctcctcacaccagagttctggtgcccagcactcctcagcagcagtgaggccacaggcagggcacaggcctctgtccctacgccaggtcctcccctaaaagggcagtggcagcaggggccgccgcagaaggaatggcagatgagacccaaagcctttggtcatcaccccagaggtctatgccaaagcctgggtggggctcccaggagatggaacagggacacataccaggcaggtccacgccaggggtgcggggccctgatgaggaaccgggctgcactggtcatggctgcacctgagccgccgccacctgtcccgcagccatcaggcaggagctgagtgggatcagcaccacgtaaggggccggcctcgctgcgctgattcgtcgagcccatccggcgacagaggacagccagaagcccagccagccccagactccagtgcaccagagcacgcacaggagcctgggcgcgctgctgtgaaacgtcctgacctgtgatcacacatgacagtgaggaaaccaagtgcaactcctgggtttttttagattctgcctgacacggaacaccaggtctgctcgtcttttttgtgttttatatttgcttatttaaggtacatttctttgggtttctagagacgcccctaagtcacctgcttcattagacggtttccaggttttctcccaggtgacgctgttagcgcctcagctggcggtgacagccggcccagcgtggcgccaccacacaccgcagagctgtccaggcacagctccgtccccagcgctcatggtgttgaaactgtctgtcatgcaccacggtgtctgtgtccacacagtaataaacggtttactgtccgcaccctcgggctcaggccctcgcattggtccatcacgctccgggctggggatgccccttttcagagaagggcccgggaccacggtgaccaggagtcgtaggagcaagatggcggtcttcgacaggaagctgggctcagaacattcccaagccccgggaaggtggggtggtgtcctggggctgggcctcaggtcctgcctgtagggaactccctacgggatctccaggaagatggtccctcaagtgcaacccacacccccgaacctcagaggactccacgtgcattctgacgggcagggccctgcgagcgtcctgttcaggggagggatggacttggggcttagcaggcaccaggcaaatgcaaggcagctttgccttctcctcggccccacaaagtctcctgggaggaccacctggcctgcaatgggctgtcccaggcccctgccctgaggcagcagccagagacagaggttctgaccctcagcttcaaggaaccagggccaccaacaggcaggccttgagatcctgtgaccattcatgcccccagttctcccacatgacctcctgcagccacagagcagtgtgcccagcagcccccaagggccatggcaggggagggagccggcactgcctgctgggacccagtggctgatctcaagggccggctcctagcacactgcacgttgttgggcttcccggcagccctagcaacaggaatatgactgctctgccccttaggaggctccactctctgagtggcttcgcctaggcttcacctaggtctggtggcacttttaacccagggcctgcagaccacagctcagagctgctctctcccgcttccctgccgccccccaggccaggagggctccccccaaggccaggagtctccccaggagcgctcaaaggactgtctgtcttcggagccaccctctgaccctgggcctggccttcagtttgtgggtgaggcctggacatgcccctttgcgctgtctgcagaaaagtgtgctgaacgaggcaccccctcaggcacagcaggaggagcgggtgctctgggttcccctcagcctgtgggcgggcctgtgtgcacagggaggggccgcccggctcaaagtcctggtgccggggccagcagcacttcctttgcagaacaagtcctgggctcaggcctcttccctgcgccactcagcaggctgcccactcggacatgggaggccggcgctgtgcggggccactcccaggtatagggggagacctgcatctcccaggtcagcagggacagcccctggcaccccactcatggagaggccttcaagccctgactgtagcctcagtctccattcctaagtcctggaggctgaggccgccttccccaaggcggtggtgggagctgcatccactgctggattgcagtgggcccgctccatccctctctggcagggagggcctcctcgctcaggcacccctcctgctgcctgcccacctctgggacatcaggacccaacccagccctgccctccaggagaagacaacctcctaggtcgcagctgcaccctcagcccttctgtagaaaggaccgacacgtctcacgtcacgcacactcccaggacgctgcccgacccgcatcccatctgagctgtggctcaccaggacagtcacctgcccggccagcccccgggcttgggtgccagatctgggcagagctcctccagcccctcctccgagctggtgtgggggatagaccctctctgggctcagggacgctccctgccgcgggagggcatacagagagcaggaggtgagcaggcccaaggggtgggggcaaggcaggtggtgtgggctcagggggatgggggagccagcctctgcgtggctcagccaggcaagggagccgtgggatccccgggctgctaggagggatttggagccacacagatgaccaaagtgagctttctgctgtccacacctcagtgtgtgtgcacaccacagtggcaggccctgagggagcactgccagcagcagccaccgtcccacaaagagccaggagtgcatggcaggacctgggcctggcctggacgaagcggcactcaggcctcaagctccactcatcggggcggcccagcgccccattccctggggccaggctcaagcccagaccaccccctcagaagcacaatccatgggctgtgaaacaaacgccgggtttaatgtagggcacaggcaccccggagaagtcagctccgtgggaaccgtgggctcagagcacccaggtcatggtggggcagggccaggcctcacctggggaggcccagaaagggagggccacactcaaggtccagggcaagtccacgtgcagacggagccctgcagcccacactgctgttgccaggtgtggctgcgcgggacactcctcggggacaagggcagcagtccagagcacaggaaggaaatgtagcttctcagtgctggggtgcaaggctgaggggccgatgggggacaatggccaccaccaggaggcagcccgggctcacagaccatcttttgccagcctgtacacccgcttcaccctggcatagggccccagggagtcctcaaacacaaaatcccagagcaccttcacccaggagtggtgctgcggcaggtggtcgtagtactcgggcgcgatcttccgcacctgtagagaggagggcggggctcaggggctggttctcctcggggccgcacccgcgagcacacacgcagacacctgagcacacgcggtgggcatgcacatgcatattcatgtacgaacatgtttgcgcgcgcgcacacccacacacacacatgggtgtacataatgcaaacacaccgtcgcctctggggtgcccatgtccagcttggccaaacacaaggccacccctctggtcctccctgccaaccaccacttcctgggtgcctggaaggctggcgctggctgctggagggcctggtggcctgaactgcgcccaggacgctgtggcagaggcacccacgggctcagctcagagcgcctgccccaagtggtagttgcagaattcattgcaccactccactcggccccgccttctgacccggcagaccccactgctcgggggagttctcccgcagcgcctgcgcagtgctgagtgcccgcctgagtcctaccaggccacagtgtcacacccatgcatctcagccctgtgatccgccaaccttggcctcagccagcctcactgcttgtcatgttccaagggcctcttgagcacctgctgtcccctccagcctttgctctacacagacacccccaccaacttcctccaggaagtgctcccagcttcagcgcccgcaactgcgccaccaccacgccgccccactgctcaacggcatgcagccttggcccagctcccatcacagggatgccctccctgcccccccccccaggatgcctttcctgccccctctttgccctgtcacctcctaaggatgctctcaggacgcagggagcctggccgcaaaaccaggacagcggggccagcaccaggcacccagagcctctcactttgctcaggaaaggtaaaggctcatggctcacggcaggcactcttgccaacttgctctgccatctcctgaggcgggcacctctcccctccgccccgtcacctcctgaggcgggcacctctcccccgtgcctctgccttatctatacaacagggataatggatgaggaggcagctgcctcctgggctgtggtgaagttcaagtgagatggtccctggtgcagagcaccgccttggtactgccagccggaatggagggcacaggccacggcccaggcttggaatttggtctgattccagagtcacacgggccacagtgcacacgcatacagggacgtgtgcacaaacacctgcacaaccaggtaaatacataaccacacacagatgcgtgtgcgcacgcccaggcacacatgcaaatgcctgcgcacgtgggcaggcacccacacataatcacagggcaaacatgctcacacacagacacgtgcacaccccggtgcacacagaggcgtgcgctcaggcgctcgaacacctccccagtgccacctcctcccgccccctttgccacaggtaactccagctctttccaggcagccagaggctaccaaggcacaggctggcaatggctgagggacggctcctcctcccccttccccttcctcctttctcattcagaaattctccagctcccagtctcctaaggcaaagatgcccatacccggggcttccactccccatcagctctgcccaagccccttgggctgcgaagggcaaggcccaccctgtcctctctggcccctggagggtcacagggcaatgacaaggaatgagcagggaaagagcctgcagacgggaaggatggtgcttcccgtgcagtgttgctaatgctgcccctcttcaaggaagacaccccgtcagtatcatggcggcatcaagcagcctggactgtgaaatgcctctcagaccccacctccctgaatttgcttcagcctccagcagaggactcgcctgtgttgtgtggcctttcctcctgccctggggacaagtgcaagtggccatgccatgactagcacaaaaagggagaggctgctgggcatggcccaaggcccttccagggcccccacctcctccgatggctgtgcagccctgccccgccgcagccctgccagcccagccacataccagcggcaggttgtagcccgggatgctggggaagtcgtggtgctccacgtggtagcccacattgaaggtgatccagttgagaggcccatagtaggagtaggtctcgtggcccttgaggaacatgtagtgctcggccacgaagtggcccgagatggggtgcaggcccaggcccaggaaggagctggccagcaggtagaccacgggcttgagcccccaaagggcaaagatggccaggtcggccgccagctgcaccagcgtgttgagcacctccatgcgggtcacggccttggggtggacgcagagcggccgtagtgagtagaagaagggctgcagcaccagccagagcagcttgcgggcgggcgtgcagaagaaccagccctccagacgcgtgggcacgtccacgtccagcccgtcgccgcccaggtagcggtggtggtccacgtggtacttcttgaaggaggcggcgtagggcacacccacgggcaggttggcgaacacggccagccagcggttgcgtgccgcacggcccgtgccgaaggccgcgttgtgcgagatgtcgtggatggccagcgtcagcgagtggttcacgcagccaccaaaggcgtaggcccagaacagcagccagcgccaggccagcccgcgcaccagccagcaggccagcatctgcaccagcaccagcaccagcaccgcccacttgaggcgcgggtctggccgcatcagggccttgatggccgggtacttggctgcaaggaagacagggaggtatgaggccccgctcggtggggctgcaccccgccctcctccgctcccactgcagtggccgaggggtgagaaggtgggagtggccagcaaacctcgctggtccctttgcccctgcacacaggccctgtccctcgagggcccgctggcccccaccctggccgagcctcatcccaccagactcagagggcaggactccagcaggggcacatgtggcccacgctggcagatgggccctgctgctccccgagccaggcctcatcccagcttgttcccacccagcaggtctgggccagcgaagacgattcagaggctgtgccttgatgccgtctgtgtactcaagcacacggggagcctcagccaggaggtggggacccagcgcccgcagcaaagtggtcccaggcagggaagcaatgtctcctgtcaggcagggcaaggaggacctgctggcagctcccactcaggaaggctctggcccaggcgcagggccaaggaagtcgcatgcaaagtcccctttgtgtgtctgtatgtaggctgagaccgcaggtccgaaggcaccactgcccactgcctccctcttacccagggacgcccctgcccccagggcagtagccaatccgcctgggggccggccagctccagccccactcccaccccaacacccccccccgccccgcccccattccacaggcaaccagccgctgcttccccttggaaagagaccaaaccttggggcaagagggaggggcaggccacacctgtgccaggtgagccacaagcaggcagctctggggagggccagcccaggcctccagcttttgggtgcaggcaagcatcagccacttctgcacccctcagaggtgagagccatgacagagcctggcagccctgaccttggagaatgggcctcactttccccatctgctgaacaaagatgctaagttctgcctacatggtgcgccctcagggtccctccctgtgccctgtgcagccgcctttcagggagccccgtgcccttcccgctttcctcagcacctcctaggactcagctgcccctccaagccccagccttccctcaggggccccactgtggaccactggagagaggagaaacctgcacacagaaggacagcagcgcccaccctaccagcccctcacccggccccagctatgggctggtcctatctcccatgggtgtgctggggcctccggagccactgggaccccagaaacaggcactgggctggcccatccaacaggcatgcccctaagtcccctctgagtggactctgggctgtttccagtgtggcacatctggcaagaggcctagtgcaggcgggtcccaacaagcctcaggggcccaaccccagccatcacctggccaatagcaggggcccaccagcctgcgtcttcccatctgggaaatggggacgccattcctctatgcccgtcaggctgtggagtggccagcacattagtctgagccctgggggtgccagcactcagtaggcacaagctggtactattgtcattaaaggaagtgctctgatctaagaggaaaagctggtcttggggcgatggcctggccctggcttgtttcaacaagagcaggcccaaagcttgcaggcttgggagccaccaactggaagtaactaaaaactgagcagtgcacgaggcagctgagcatgggcagcacagggcgcgactcaaggagggaacagatgcagggagccccaggtcacctcacctgcctgcaggcacctgctggactgcagcacgtggctgagggacccccaaggagctgaacgagcagagaatggcactcagggagcccgagacacccacactgcaggtacagggggctcctgccaaaggcctgaggcccagagaagctttgctggagcaggagctccatgacagttctgaaaacagcagctgctggagctttgcacccaaggagttccagaggtggcacaggctgggagtcccaacccactgggcagaaaggcctcactgaacaccccagcctccagtgggccccccggaagccctgtcttaggagtgggtctactctgcacccacccaaggtcagttgactgactccttgacaggagaaaacaacccacgctttttgcaaagattgcaaagatctaccatcttcagctccagagcgcccaggtccctgggggagtgggagtggggacgtgccaggaacactcgggaccacgccatgcagactggatgtgcaggagagggtcgtggctgaggtcaccctgggtacggtcaggatggagtagtaactgaagccagggcttggaggtggtcagctgccaggggtcacagaggttcagggacaagaagagagagcaggtgtccctcgacttagccaggtcatggtgtctcagcaggagccattccggcacagcccgaggcaaggcgagggtgagatgaggtagcgagggtgggtctgcctagggcatggggcagggagggcaacagggaggcaccagaggacggcaggatgggaaggagatgccagggtgggcgtcatggagatgccagggtgggcgtcatggagatgccagggtgggcatcatggagaaggcaagggtcactggagctgggtgccaaggggactcaggaactcctcgagagctatggagcattatttctgggtgtctgtcaaggtgtttccagactggcagagggtaagtggactgagtgaggaaggcccgcccacaatgtgggccagcaccatccaatcagctagggccccgatagaacaaaaaggcagagacaagggtctccctcctgtctttccctccctctctcctcccatccttctctacttctcccaccacttccctctcttggagctgcaacacacacttctctagtccttggatatcaaaactccagcctttggactccaggaactacaccagcaccctccaccctccgcctgctttcaggccttcaatatcatactgagggttccaccgtcgagttccctggttctgaggccctcagactcagactgaaccacgctacccctactgccacccctgggtctccagcttgcagacagtctgtcatgggactttacagcctccataatcacatgagccaattcccctaataaatcccctcttcgaatggatggatggatggatggaaggaaagaaggaagggagggagggagggaaagggaaggaaggaagataggaagatagatcgatatatcgattgatccaggcatggtggcttacattgtaatctcagcactttgggaggctgaggcaggaggtttccttgagcccaggaggtcaggatcagcctgggcaatatagcaaggccttattatgcaaaaagtttaaaaatcagccaggtgtggtggtgtgtgcctgtggtcccagctacttgggaggctgaggtgggaagatcgcttgagcccaggagttcggggctgcagtgagccgcaattgcaccactgcactccagcctgggcgacagtaatggcaaaaacagatagatagatagatagatagatagatagatagatagatagatagatagataatagatgtgagagatagatacatagatcctatcagttctgtctctctggagaacactaatacagggcctcttccagggcctcaaagaaagggggacagggagaatgggtggggctggggagtgggagtcaatgggttccatggccttgggccccatcttctctgggccacaagagagggggaaagcccaaggcagagaaggacagggagagacacagctccctggcagccccatgaggaattgcaggcctgcatgggctctggctagacacccaaacctggcccagcctgggaactctgtcctgctgtgggcactcagctgacctcaggtgtgactctgcccttccacacctccagcctggatggcaggagtagctgggagacacatgtgccttgagggctctctgctccgtggggcagcacagagcccgacgtgcacagccacctggaaccaagatacacagacccacacagacggtttccagcagcggccccaggtgaggcacaaggcatctgggcaggtggccatgaacaacagctgttgctagaagtcaccctgtccaggcaggactcaggaagggtctgaggtcaagggaggtgcaaagaagggcccaccaaggtgcaacaaggctgaccgagccaagacttgaactcaggacccccgactccaggcctgcacaatggtgagcaaggccccgatgtggactcagactccatcagcaccgatctagtgcttggctacactgccacagagcacccagagaaaattctggatcagatctgggcgcagtggctcacacctgtaatcccagcactttgggaggctgagacgggcagatcacttgaggtcaggagttcaaaaccagcctggccaacatggtgaaaccccgtctctactaaaaatacaaaaatcagctggacaaggtggcgtgcgcctgtagttccagctacttaggaggctgaggcaggagaattgcttgaacctgggaggcagaggttgcagtgagccaaaatcacaccactggactccagcctggcaacaaagcgtctcaaaaaaaaaaaaaaaagaaagaaaaaatcatggatcaggct

SEQ ID NO: 3186 - DNA, 2067 bp, Homo sapiens
ctctggttcagcttccttttcctgtttggttttaagtaggctataaaaatcaagttgctgtcttcagagggtctgtggtcctctgatcaacataggctggtgggagtacaggactcgcctcctcagggttccctgtgctgccacttttcagccatggccacaagtgaacagagtatctgccaagcccgggcttccgtgatggtctacgatgacaccagtaagaaatgggtaccaatcaaacctggccagcagggattcagccggatcaacatctaccacaacactgccagcaacaccttcagagtcgttggagtcaagttgcaggatcagcaggttgtgatcaattattcaatcgtgaaagggctgaagtacaatcaggccacgccaaccttccaccagtggcgagatgcccgccaggtctacggcttaaactttgcaagtaaagaagaggcaaccacgttctccaatgcaatgctgtttgccctgaacatcatgaattcccaagaaggaggcccctccagccagcgtcaggtgcagaatggcccctctcctgatgagatggacatccagagaagacaagtgatggagcagcaccagcagcagcgtcaggaatctctagaaagaagaacctcggccacagggcccatcctcccaccaggacatccttcatctgcagccagcgcccccgtctcatgtagtgggcctccaccgccccccccacccccagtcccacctccacccactggggctaccccacctcccccacccccactgccagccggaggagcccaggggtccagccacgacgagagctccatgtcaggactggccgctgccatagctggggccaagctgagaagagtccaacggccagaagacgcatctggaggctccagtcccagtgggacctcaaagtccgatgccaaccgggcaagcagcgggggtggcggaggaggcctcatggaggaaatgaacaaactgctggccaagaggagaaaagcagcctcccagtcagacaagccagccgagaagaaggaagatgaaagccaaatggaagatcctagtacctccccctctccggggacccgagcagccagccagccacctaactcctcagaggctggccggaagccctgggagcggagcaactcggtggagaagcctgtgtcctcgattctgtccagaaccccgtctgtggcaaagagccccgaagctaagagcccccttcagtcgcagcctcactctaggatgaagcctgctgggagcgtgaatgacatggccctggatgccttcgacttggaccggatgaagcaggagatcctagaggaggtggtgagagagctccacaaggtgaaggaggagatcatcgacgccatcaggcaggagctgagtgggatcagcaccacgtaaggggccggcctcgctgcgctgattcgtcgagcccatccggcgacagaggacagccagaagcccagccagccccagactccagtgcaccagagcacgcacaggagcctgggcgcgctgctgtgaaacgtcctgacctgtgatcacacatgacagtgaggaaaccaagtgcaactcctgggtttttttagattctgcctgacacggaacaccaggtctgctcgtcttttttgtgttttatatttgcttatttaaggtacatttctttgggtttctagagacgcccctaagtcacctgcttcattagacggtttccaggttttctcccaggtgacgctgttagcgcctcagctggcggtgacagccggcccagcgtggcgccaccacacaccgcagagctgtccaggcacagctccgtccccagcgctcatggtgttgaaactgtctgtcatgcaccacggtgtctgtgtccacacagtaataaacggtttactgtccgcaccctcgggctcaggccctcgcattggtccatcacgctccgggctggggatgccccttttcagagaagggcccgggaccacggtgaccaggagtcgtaggagcaagatggcggtcttcgacaggaagctgggctcagaacattcccaagccccgggaagg

SEQ ID NO: 3187 - protein, 412 aa, Homo sapiens
MATSEQSICQARASVMVYDDTSKKWVPIKPGQQGFSRINIYHNTNTFRVVGVKLQDQQVVINYSIVKGLKYNQATPTFHQWRDARQVYQFASKEEATTFSNAMLFALNIMNSQEGGPSSQRQVQNGPSPDEMDIQRRQVMEQHQQQRQESLERRTSATGPILPPGHPSSAASAPVSCSGPPPPPPPPVPPPPTGATPPPPPPLPAGGAQGSSHDESSMSGLAAAIAGAKLRRVQRPEDASGGSSPSGTSKSDANRASSGGGGGGLMEEMNKLLAKRRKAASQSDKPAEKKEDESQMEDPSTSPSPGTRAASQPPNSSEAGRKPWERSNSVEKPVSSILSRTPSVAKSPEAKSPLQSQPHSRMKPAGSVNDMALDAFDLDRMKQEIEVVRELHKVKEEIIDAIRQELSGISTT

SEQ ID NO: 3188 - DNA, 3168 bp, Homo sapiens
cccgggcagcgcccgccaagatggcaggggccggggcccagctgtcagtcgccgccgccgcggcccttccccgcagctagcggccccgacgcccacccggagaagatgagcccccgctgccccccgcagcccagtcagacgcggagccgccgcgcccggggccggctcccccgctagcgcccgcgtcccgcgccccgccgccgccgccgccgccgccgccgggtcgcccctggcccggcgcgcccgtccccggcagcgacaatgagtgaacagagtatctgccaagcccgggcttccgtgatggtctacgatgacaccagtaagaaatgggtaccaatcaaacctggccagcagggattcagccggatcaacatctaccacaacactgccagcaacaccttcagagtcgttggagtcaagttgcaggatcagcaggttgtgatcaattattcaatcgtgaaagggctgaagtacaatcaggccacgccaaccttccaccagtggcgagatgcccgccaggtctacggcttaaactttgcaagtaaagaagaggcaaccacgttctccaatgcaatgctgtttgccctgaacatcatgaattcccaagaaggaggcccctccagccagcgtcaggtgcagaatggcccctctcctgatgagatggacatccagagaagacaagtgatggagcagcaccagcagcagcgtcaggaatctctagaaagaagaacctcggccacagggcccatcctcccaccaggacatccttcatctgcagccagcgcccccgtctcatgtagtgggcctccaccgccccccccacccccagtcccacctccacccactggggctaccccacctcccccacccccactgccagccggaggagcccaggggtccagccacgacgagagctccatgtcaggactggccgctgccatagctggggccaagctgagaagagtccaacggccagaagacgcatctggaggctccagtcccagtgggacctcaaagtccgatgccaaccgggcaagcagcgggggtggcggaggaggcctcatggaggaaatgaacaaactgctggccaagaggagaaaagcagcctcccagtcagacaagccagccgagaagaaggaagatgaaagccaaatggaagatcctagtacctccccctctccggggacccgagcagccagccagccacctaactcctcagaggctggccggaagccctgggagcggagcaactcggtggagaagcctgtgtcctcgattctgtccagaaccccgtctgtggcaaagagccccgaagctaagagcccccttcagtcgcagcctcactctaggtaccgaacaaccctcctgctcacatgtcccccagggtttggggctcctctgtcccccgtcccgtgactaacacccttgcacgctgtctcacgtcctggcatttaacaacttgctctgcgaaggtggtctgttctttcagacccaggacctcggggtcctgtcagtcagctgctccgtcttttccctctgagagagagaccaagggcaaggagggcagtgacctgtccacagaggtagtgcaggggggggccaacatggagtcccagctctggactcactacgtgtgacagtgggcaagttaggggacctctccaagcctctgttttccccccacaaagtgaggtctgttaacccctgctgcacagggtggtggtggggacagctgtgagcaacagctggacatggggtgtggtcactagccagggctgcaccctacagttcaaccagtcctagcactggcgctgagccctacccctttcctccagcccagagtccttcctctgcggccggcacacagaatcagtttccccacagacatactgaccatatttcccaagccaaaagctggcatgacaacatgatagaatatttggaactgagattgcccaaaaaggcagaggcagccagccacatagtatctggaggtacatgtggcctgaattggaaggcctctagaacctgcgtcaagaatgtctccatcgccaccacaaattgaagggaaaccacccttatcacagagcaggaggcattgaaactggccttgcagagctgaacaggtggtgagagcagagcagtgcaggtggacagagatgaggaagtcttagcagtcagctggggtttgtccaaggcttgtggtcagccaggccgtgtgctggggacagtccctgcctgcaaagagcaccgtgtgaacaaggccactgtggtcctgaggggtgctctggacagggtgcagggccacatggtggaagggacagggtgctttgcggagtggggtggggcaagcctctgtcgggagctggcattttcgttgacccggacgaggaggagtctgctctgcggagatcatggggacagcctcccaagctgaaggaagggatgaagcctgctgggagcgtgaatgacatggccctggatgccttcgacttggaccggatgaagcaggagatcctagaggaggtggtgagagagctccacaaggtgaaggaggagatcatcgacgccatcaggcaggagctgagtgggatcagcaccacgtaaggggccggcctcgctgcgctgattcgtcgagtcctgacctgtgatcacacatgacagtgaggaaaccaagtgcaactcctgggtttttttagattctgcctgacacggaacaccaggtctgctcgtcttttttgtgttttatatttgcttatttaaggtacatttctttgggtttctagagacgcccctaagtcacctgcttcattagacggtttccaggttttctcccaggtgacgctgttagcgcctcagctggcggtgacagccggcccagcgtggcgccaccacacaccgcagagctgtccaggcacagctccgtccccagcgctcatggtgttgaaactgtctgtcatgcaccacggtgtctgtgtccacacagtaataaacggtttactgtccgcaccctcgggctcaggccctcgcattggtccatcacgctccgggctggggatgccccttttcagagaagggcccgggaccacggtgaccaggagtcgtaggagcaagatggcggtcttcgacaggaagctgggctcagaacattcccaagccccgggaagg

SEQ ID NO: 3189 - protein, 380 aa, Homo sapiens
MSEQSICQARASVMVYDDTSKKWVPIKPGQQGFSRINIYHNTNTFRVVGVKLQDQQVVINYSIVKGLKYNQATPTFHQWRDARQVYQFASKEEATTFSNAMLFALNIMNSQEGGPSSQRQVQNGPSPDEMDIQRRQVMEQHQQQRQESLERRTSATGPILPPGHPSSAASAPVSCSGPPPPPPPPVPPPPTGATPPPPPPLPAGGAQGSSHDESSMSGLAAAIAGAKLRRVQRPEDASGGSSPSGTSKSDANRASSGGGGGGLMEEMNKLLAKRRKAASQSDKPAEKKEDESQMEDPSTSPSPGTRAASQPPNSSEAGRKPWERSNSVEKPVSSILSRTPSVAKSPEAKSPLQSQPHSRYRTTLLLTCPPGFGAPLSPVP

SEQ ID NO: 3190 - DNA, 2073 bp, Homo sapiens
cccgggcagcgcccgccaagatggcaggggccggggcccagctgtcagtcgccgccgccgcggcccttccccgcagctagcggccccgacgcccacccggagaagatgagcccccgctgccccccgcagcccagtcagacgcggagccgccgcgcccggggccggctcccccgctagcgcccgcgtcccgcgccccgccgccgccgccgccgccgccgccgggtcgcccctggcccggcgcgcccgtccccggcagcgacaatgagtgaacagagtatctgccaagcccgggcttccgtgatggtctacgatgacaccagtaagaaatgggtaccaatcaaacctggccagcagggattcagccggatcaacatctaccacaacactgccagcaacaccttcagagtcgttggagtcaagttgcaggatcagcaggttgtgatcaattattcaatcgtgaaagggctgaagtacaatcaggccacgccaaccttccaccagtggcgagatgcccgccaggtctacggcttaaactttgcaagtaaagaagaggcaaccacgttctccaatgcaatgctgtttgccctgaacatcatgaattcccaagaaggaggcccctccagccagcgtcaggtgcagaatggcccctctcctgatgagatggacatccagagaagacaagtgatggagcagcaccagcagcagcgtcaggaatctctagaaagaagaacctcggccacagggcccatcctcccaccaggacatccttcatctgcagccagcgcccccgtctcatgtagtgggcctccaccgccccccccacccccagtcccacctccacccactggggctaccccacctcccccacccccactgccagccggaggagcccaggggtccagccacgacgagagctccatgtcaggactggccgctgccatagctggggccaagctgagaagagtccaacggccagaagacgcatctggaggctccagtcccagtgggacctcaaagtccgatgccaaccgggcaagcagcgggggtggcggaggaggcctcatggaggaaatgaacaaactgctggccaagaggagaaaagcagcctcccagtcagacaagccagccgagaagaaggaagatgaaagccaaatggaagatcctagtacctccccctctccggggacccgagcagccagccagccacctaactcctcagaggctggccggaagccctgggagcggagcaactcggtggagaagcctgtgtcctcgattctgtccagaaccccgtctgtggcaaagagccccgaagctaagagcccccttcagtcgcagcctcactctaggatgaagcctgctgggagcgtgaatgacatggccctggatgccttcgacttggaccggatgaagcaggagatcctagaggaggtggtgagagagctccacaaggtgaaggaggagatcatcgacgccatcaggcaggagctgagtgggatcagcaccacgtaaggggccggcctcgctgcgctgattcgtcgagtcctgacctgtgatcacacatgacagtgaggaaaccaagtgcaactcctgggtttttttagattctgcctgacacggaacaccaggtctgctcgtcttttttgtgttttatatttgcttatttaaggtacatttctttgggtttctagagacgcccctaagtcacctgcttcattagacggtttccaggttttctcccaggtgacgctgttagcgcctcagctggcggtgacagccggcccagcgtggcgccaccacacaccgcagagctgtccaggcacagctccgtccccagcgctcatggtgttgaaactgtctgtcatgcaccacggtgtctgtgtccacacagtaataaacggtttactgtccgcaccctcgggctcaggccctcgcattggtccatcacgctccgggctggggatgccccttttcagagaagggcccgggaccacggtgaccaggagtcgtaggagcaagatggcggtcttcgacaggaagctgggctcagaacattcccaagccccgggaagg

SEQ ID NO: 3191 - protein, 410 aa, Homo sapiens
MSEQSICQARASVMVYDDTSKKWVPIKPGQQGFSRINIYHNTNTFRVVGVKLQDQQVVINYSIVKGLKYNQATPTFHQWRDARQVYQFASKEEATTFSNAMLFALNIMNSQEGGPSSQRQVQNGPSPDEMDIQRRQVMEQHQQQRQESLERRTSATGPILPPGHPSSAASAPVSCSGPPPPPPPPVPPPPTGATPPPPPPLPAGGAQGSSHDESSMSGLAAAIAGAKLRRVQRPEDASGGSSPSGTSKSDANRASSGGGGGGLMEEMNKLLAKRRKAASQSDKPAEKKEDESQMEDPSTSPSPGTRAASQPPNSSEAGRKPWERSNSVEKPVSSILSRTPSVAKSPEAKSPLQSQPHSRMKPAGSVNDMALDAFDLDRMKQEIEVVRELHKVKEEIIDAIRQELSGISTT

SEQ ID NO: 3192 - DNA, 63693 bp, Mus musculus
  misc_feature (1)...(63693): n = A, C, G, or T/U
gcttctcacagtcagaaatcaagccagtggggcatactttaaagattttagtccctctgttaatgttttggaatataaaaatttcaaatcacttttggcaactgattggtatatgtgcttacagaaacactaggactctgggggtttcctgatgagtttttactatacagcatatatctgcaccttttctcacctctgtgccagaactccttgaagaaacaatttaagagagaatgggctgaccttggctcctggtttcacagggtacagtccataagggtgggaagacaaaatagatagggtggctctatccatgacagcaggagcttctgccatggctgtccacagccaggcagctcagcgagctaggtgcactggaagtgcgttgggttgtaaccctcaaagaccagcctccttcacctgccagccaggcatcaagtcccaaaggttccacagcctccctaaatagcaccactgactggggaccaagcattcaaagcatgagcctgtctgtaaaagtagcttttattctcctgaaataattgatgtctcagtggaggtttattgcctccatctgctaaccgaggccttagtcctggaagcttttaacctccacacaatcttatctaggcctagaatgttttcagcctctgaaacgtattactgaataagctcactctttcttgttctttctgagctctggcaggctggctccactcagctgttctggctcaaactcctctcccagctgacttagtcaatatgactttcctctccacctctgactagctgttctgtaatctctcctttctagactgtctgtctctccctttcctttcttcctgggagggttgggcatatcctattctgcaactctttccctgattcatcactttttctgccactcaattagatatcactttcaaacatgtgtgcttccttttgggattaaagatgagtaccaagggtgtgtctgtattccagcaagagggcttaaaggtgtatgccacaggctgagccccaccctaactagaagcagtttcaaatatcctgtaacacctgtgagtgacttcacattcaaaccataacagccccatttggataagatatactgtgctttactaaactcccaaggggctagggatatggctcagttggtaagagcatttgttgaacaagcactagacctgagatcccagcatccctataaataaaaataatttaaaagttttaaaagagacagatgtggccacatgtggctgtgtactgacttgtagccccaggacaatgttggatggagacagaagaaccactgaagcttgctggttacctgcctgactccaggtctcaaatatctaaggcagagtcctcctctggcctctgtacccaccctgtttgtatggcataaaagggcaaaggaaaagcaccttgatccttccttgatcccaagaccagggccatggaaagagtaccctgacccggacttgatcccaaccccaaatccaggacaagaaacagaattccaccaattcctgaacttgtcacagaaacctccaccaatccctgagcttcaaaatcaagccacagtgcttgcaatcccagatgattctggaaaactcttcccacccccaagaaattgtagatgagccctgcttcctgctcgggtccctactacttttctcccaagcagaggcagccaccatcctagggttttccctcccaataaatctcttgtgtgaggtttgctgtacggttgtgactttctggtattccttggctcctgactgccaggctatctctgagagcagagcatttgctagggagcccctccccctgcaggaacagaactggaacactttcactgtggaaaccttcccttgcagcagccagagctgttgtagtacttctgtagagaaagccctttccttcagagctgcaacacttacagtgtgtatacacacagacccaggtaccacacccacaattcttaaaaaatgacagtgtgctgggaagattagcccacttaccttttcttcttgctctgtccccctcgacacacagctgccaaactaatcatcccaaaacatcaattttcttctgccaccccaaaacccagcttcctgacttcctgttgtctaagacctagtcctgcgtgcttctgcctggtgctcacggctctcgatggcatagatcctccaaaatgtctccctctgcttcatttcttctaccaccagctttgtgtccttgataatttatccaaaaagccactcccaattccccttgggtgttttccctatcttcttagcccactgtcctcctgtactcatgtcctgagaagcggtaacaaagtcaacagccacctcctggggccaggggtcaaggggtgatactgcctaccactgtcctagtttcatttctgttgtggtgattaaaaaaaaaaatacatggaacaaaacaaagcaccctacaatttaggggagaaaggactgatttcagctaactgttccatgttagagtgcattatagctggcagagagatatgaatgccagcttacgtgctagggctcgggtagctttcttctttcttatacactccaggactatcagagtaggaaatggtgccacccacagtgggcaaggtcctcccacatcagtgaaacctgggaagaaaagcccttgccagcatgccacaggccaacctactctagataactcttctttgaaactctttttcccaggtgagtcaaggctgtggcaagttggcaactaaccatctgtactaccaaaagccatgagctgaatgggacaattacctcccacaggaaaaccaggacaccattgtaagtgttacagctcaatgggaaacgactcttggcagttgggagctaaggaataccacaaagccacaccagacagcaaacctcacacaagagatgtatcgacagggaaaaacccaggaccgtggctgcctctgcttgggagagtgaactgggcagaacacagagcttatatggggtgttttgggggcggggaacctttcaggatggcctgggacaggggagattatgtggcctgatttttgggacaatcgagtaattggaaggatttcttttcttatagggaggagccactctcccgcctccttagttgctgttagaaacctgcaggccattagggcctagagaagcctccgcagggcctggccaatttcctaccttaagggttgcaaagtttacaaagtatacaaagcttaacaaagggagtatctatctgtccacagcagggagctgacttaaacggccaactataaggaagagttagtggtggactccagatgctggctttgaggtactccagatgaggctgagtggaaaactccccaaccccataagaaaatgctgggactttccccactccaccccacccctcaccccaccccccacccnnnnnnnnnnnnnnnnnnnnnnnnnnnnnnnnnnnnnnnnnnnnnnnnnnnnnnnnnncccatcccacccccatcccacccccggagacagggtttctctgtatagccctggctgtcctggaactcactctgtagaccaggctggcctcgaactgaggggacttcttgttggagcaccttccctcatttctgactccaggaggggaaaccaagcctgtcctcttctaagttcgaggaaatcccctgtgtccctacagccatatactgccttttacagtttaaggtactttatttagatcagatcctgtgaggtggctgaatttattattatctgttgctgtgataaaactccacgaccaagagaacttatagacgggagagttttctgggcccaattccagaggaacagagtccatgatggcaaagcaaaggcctggcagtttacagctctgaagggaaaggtagcctggctgtcaggatccaaggaataccacagagtcaccacacaacaaacctcacctaagagagttattgggagggaaaacccaggagggtggcttcgagcaaggagccgcagggaactgagcggaaggcaggctttatataggcgttttgggggtggggctttccgatgtggcccaatcttggagtaagtttagggattggtgggaatttgtggttagactctggggcaggctcagagattggtgggattctgcgacctaatcttgaagcaagctcaaggatttgatgagattctgtggcccgatcttagaacaagctcgaggattggtgggattctgtggcccgatcttagaacaagctcgaggattggtgggactctttatcttgcctctgggcttggacttcgggtcaaatctgtcagagtgtttttccctggctccggacttggggtcaaatcagagtcagagtagcccccccaacacacacaccctgatctcagagacaagtcagggtcagggcttcccctggcccctctacccccacaaacaggaagccaaggactgttgaactgcaagcagaagtagagagagcaaattctaacagacactagtcattggattcttgggctggacttgaacgtgtgatttttcctgactctaaatcctgagttttgggattataagcacaggccactagttccagctaaagcatatttaaacagttctttccccattaaaaaataaataagtaaataaataaataaatccaccaaacttctttcgtaatttttgtctctagctacctgtggggggaaaaatacaagaccaaaagtttttctgtacttcatataacagacattggctatactataaaatttcaagagagagagagagagttagttcatgtgtccttgaggccagagatgttggatcttcatggaactggagctatgagcaattgtgagctatctgacatgggtgctgagaaccaatctaggcttctctgaaatacattgttagaccataagccacctttttagcctcagggcttcacatttggtttggtgcatggaatcaagtttaagaaaatatttgcaggccttggtagtgtagacctgtcatcccagcacctctgagagctgatgcaggagaatgacacgttcaggtctgctgcctagttcaaggccagcctgagcaactcagaagagctctgtctcaaaatcgagactaaaacaagagctacagtacagtccagcacaaggctctgtgttcaaccctttccaaatcacttaatggatgctattatctacccccttgtccatggcatgtaaaaacggggtatattgaaatatttgttggaaaagcaccaaccaataaaaactttaggtctgcggtgagattgtgtctcctagaaatgacaaagaagttatacccatgatgcctcaacataaggaggcctaatcaagacctgaacagtggcaacaccaacagacctgctaacatggagggggaaatctcacagggcctcacccctagataaagaactaaagacaaccaaagaatgctgagactgggaaaatagtctccccagggatgggtccatgaattgattatccaacatcaaggggtcatccctgaaatcacattcattcaagcaacactaaaaggtcatatttatgtacctgtatgtgacaataataattggacgcgtgaatttgaaagggaacaagggatgggctttagggaggagaaggaagggaaaatgatgtaattatattttaattatttcaaattgaagtaaaaaaaaaaaaaacctgctctcagtaggctaacttgtaagggaaacctgtaccgcaggacagtcacctacttgtgtgacagtcacgggattctcctcttccctttccctcctctccctttaccttctctgcctcttccttgattctcttgtggtttcatgccagagtcaaagtcagctggttggactctgagatgaccgagtcagaatgggacaagtagaggtaaattaaaaatccccaaagcaacaacattgggcatagcatgtgcctgtaatctcggaggtggaggcaggaggattaaaaactcaaggtcatcctcacctacacagggaattcaaggctgctgggatacatgagaggcgctctcagcatagaagcaagttaaaaacaaaacccaaaatagcaacaaaacaaacaaacaaacaaacagagctggagagatggctcacttgccaagagaacaaaaggacgtaagttcaaatctccagcactcctgtagaagctgggcatggccacaggtgtcggtgaaaacagggagatcctggagcttgctggccggccagcctaaccagaatgctgagatttaatgccagagacacgttgtcttaggaaagaaagaaaggaagaaaggagggaaggagggagggagggagggagggaggnnnnnnnnnnnnnnnnnnnnggaaagagggaaagagggagggagggagggttcaatagaggaagaagtatgacatctttggcctctcatgtccaagctcataacagacacacacaatgtccacaccccaactagataaactacatacacacacacacacacacacacacacacacacacacaaacccaaaaaacaaaacagaaagcattaaagcaagggaaacagagaattggacaaaggtcttcaagactgatgaggcttgggggactctatgaaaacgtcaacaatgtccagttttacaaggatatggaccgataagatggttcagagataaagatgctcactgctgagcctgaggacctgagctccatcaccaggatccacaggagaaaatagagagctaactggctcctgaaatttgtgctctggcctccacgtgtgcacacataaatgcaagctttcacacaactgatcaatcagtcagtcagtcaatatattttaggtgctgcatagaacactcggtacttttacagaggacctgcgtttggctcccaggcacctatgctgggtggctcacaacgcccccctacctccagttctaaggaatcagacaccttcttttaacatttgtgagcacctgcactcatatgcacataaccatatatacatatacatacacataaacacatactttttgctgggtggtggaacatgcctttaattccatcactcatggggcagagaagcaggcagatctttcagtatgaggccagcctggactacacagagagaccctgtcttgaaaaacataaaaaggcatcagacatctcattgggcatttgtgggcacctgcactcacacatatccacacagaaataaaaataagtcttaaaaaatactttagaaagggtcacatgagcaccactacccagaagggcagtctctgggagcagcagaagcttccatattggatgtcctgagacgtaagagcgtttcatgggaagttaagaggatgagaaaactgttcattactgttttgaacactgaaaacagtaggtcctatgatttgctatactttagtgatcacaaaacatgtaggggaaatagaggatgagagcagcagctacagcttatgagaaaggaagccaaagaatcacactgaaatatcggctctttctttaaaacaaaaaacaaacacatgaccttggactgagtggttttaatcccaggacttggaaggtaggcagatgtctgagttcaaggccagccttgtctacagagcaggttcctgaacagtcagggctatggagtgaaacactgtctcaaaaagccaaaaagaaaaaaacttccccttagactggagagagatattagcagttaagagcactgacagctcttctggaagactgggtttgagcacccacaactgtaactcaaataccaagggaatagaagccctttttctggcctctgaagggactacatacatgctgcacacaaacatgcaggcaggcaaacacacctccacacataaaaacataaaggctaaaaataattaattaaccttagtcagatgtggaaggtacctgcaattccagcccttctgtggatctgagtttgaggctagcctggtttacagagtgagactctcaaagaaggaggaggggacaacgacgatgagtaagtcgaaggagaaaggaggagagaggggagagggagagggagagggagagggagaggnnnnnnnnnnnnnnnnnnnnnnnnnnnnnnnnnnnnnnnnnnnnnnnnnnnnnnnnnnnnnnnnnnnnnnnnnnnnnnnnnnnnnnnnnnnnnnnnnnnnnnngagagggagagggagagactaagttcagcagggaagggacggtcctagcctccagcctgatggcccgagtgtgatccccatgacctacagcaggagagagtgaccttctgacctctgcgtttgcttccatggcacacactcatccatgtgcacacacataagaagaaagacactgtagatatctgaatcatcttctacctagtgaaagatataagtaacgaaacgtactgacaatttccttttgaaaaacaaaccgctagaacttgcgctaacaagacagcccaactgtatatgtggtttctaacaaccaaacctcagaaatgaattccatctctgcgtggagtatagaaggaaccacagaccaaacctcaaagtagactccctgagaaaataccctttctaaattaatttccctaccttacctgagcctttgtggcctcctctctaaagacccaactcttccatggcagcatcttatggagaatacaaaccaaccccaagagtgccgtgagcctcagaaccacagagcagcctggggggcaccacaaagatacattggcatttgctgtctccctgaaatgttcagtttattaattaatctgaattgggtaatttgttaatgaaattgtccagcaaatactgaaataatctttcttttcttacttcctcctcctccccccttcctcctcttttttaataaagccccacaccataaagttcttggtggtctcaaactccagactcccctcctgcctcagtctcttgtgtgctgggattacaacgtatatcatcaggctggggcttatgcatgccaggcactctactactgacctacatccttggctggcatctcctttaaactccttttttaaaaagaaaatagttctatgcttatgtccaaggcagatatagattatgtgcttcctttcagagattcctattaaatgtaacgtgtctgtaacctttgtatatggcacatagtgaagatgctgccactagagctggagaggcagcttagccttgaaagtgctaccacttttgcaaaagacccaagctcagttcctagcaaggccacaaccaccagcaactccacctttaggggagctaccaccgtcttctagaccctgtaggcactgtacttgtgtgttcatacccctcacccccaatatgatttaaaaaataatagaaataacttaaacttttaaataaaatatagccattttaaaagatcagattcgccatgcagtggtggcacatgcctttaaccccagcacttggcaggcagaggcaggtggatttctgagttctacagagtgagttccaggacagccagggctatacagagaaaccctatctcgaaaaaacccaaaaaacaaaaaacaaaaaaataaaaaaataaaagatcagattctctgctcttaattagaataaaatcccatttaagctaaatcttaattcgtttaagggcccatgggttctgcatttctaacagaaccgtatactgtttttttggtttttgctttttccttcagaggagtaaaccagagacctcaagactgacttttcttcccgctcctttgtgtagtgctcacccaggaggtcaggcagtaactaatgccaaagaaacatcaaattagaaagtgctagcgtgtgcggtcatgccgccgttcaggctgcctgaagattaggaaactgttcaaacatcaaatcgccggcaggcgtctcagcccgggcctgtgcaaggagcacgctgggagtgctttggtgtcccagctgaggacgagattaggagccgggaaagccacccgcgcgtgcggcagccaggggaaggctagctgaaaggctctcccagttgcgatcgcgtgggacctccgtggtaagaccagggttctacgccctaggtaccagcagggcaagtgctccgggggcccctcggtgtcctctcgtgcccaaccgcaacccacggaatcctctccagagttctggagagactcgcgccgggaaggggctttgctaattgcaggaagtgagcacgaggaagaagtggcagagatcaagaagaggaaagggaggaggaggagcagcagcagcagcagggcagagcgcagacagagtcgcgcattaccacgcaagaggttgggtccctgcgatcctgctgttctcaggggtcctagagactgtccacccctgctcggacactcatctgtcctctcctggtcttcatggcttctccggacgaccctctgcgctcaggtaaagcggcaaggtgccgcgccctcacttggggtgtgaccaccagctggattaatgagactgaaagactgaacttcagtcatcccctgggagcggttttttttttctttctttcttccttccttcctttctttctttctttctttctttctttctttctttctttctttctttcttttttttttttttttttcttttggacaccagggcgccagatgtgtgtcaggctggatgggaacagctgcggcacgcgtcttacctctcccgatcctacccctgcgcttgcccctctgtgagcagcagctgatcgctcgcttcctgcacactgcaaggtgtgcgtggtccctctccccacgcggaggcccggccgagcgcttttgttctgggccacgcgggtgcctggttgaaacaagtcagccaacctttgatagaaaagaacataggagggaggattctgcacccccttccttccaggctctcccttgctttccactcgcacatttccttgttcgtcttctccctcctagcttcactttgctgagatgtgtttgcttctgtgcaagtcttaacctctccgagccactattcaactattatactgtccacagagccacgaggctgagcccacatgcgcaatccccacctgtggaggtctctagtccccgtagtacattaaaaatgtgctttgatatctgaggtcagaatctagatttttctatcgcttctccctcatttaaggaaaattcctttaaacgtcaacgtccaggaatctcctctgtcctcctgtaatctagctacaaactccatcggtgtttgtgaacgaaaggatgatatgtccctttgagtacgctaggtctttctctggttttggtgaggttggacactctggtaagagccacacagaaccagactagactgctgagatcgatgtgattgcttgtgtttcgtatttcatttcttgagtggagtagggacagagttcaagagctaagccctgattaccggcttgacctgacagagaagataccatgtctggcagtggccagaagcttaagcccagtggccattctgatttggcggccattctgatttggcatcttggagtgctggtttgggaagggggctgtttactagtgacatcaaaaaaaaaaaaaaaaaaaaagaactaaattattcaaacgtagcacgctccacgggctatcaagtgaactggccaaccctcacattgtttgcaagaacagaaggggacttaaggggacaattctctcatcgggtgcctgctgctatgtatgtattgtcctccttgtgctgaggactgtatgaataagatgtcaaggggtgtttggttttagtcatgatggtcccagacttagtaaatgatactggattcaagagatggagaagaggagttcattggataaggatacaggtaacatttgcctgcgctgcctctcgacccgactgcatcagagaaaatgggggcagggacggggtggaaaccaaccagttcagcagtaacaccagcataaaaagcctccgggagagggggttgctgaagagatggctcagttagtgaagtgcctgccaagcaagcatgaggtcttgcattctggtctccagcacccatattaaaagtcaggcagagtggaactgccgtggcacccatgccttcaatgctagggctgtggagggtggggtggagagatctctggggcttgctggccatcagcttagttccaggttcagtgagaggccctgtctcaagaagtagagaatgacaaagcatgacacttggcatagtcctctgtcctccatacaaacacatgcaaatgtcggcatacatgtacatatacattggacacatgcacagtaattgagaaagacacccaaagttgacttcccgtctgtacacacatgtgcatgagcacctgcacatgtgtgcactgtacctatgtgatcatatacacataaacacacacacacacacacacacacacacacacacacacaaagccatgtgtatgtgctggtagatatatgaacgtaggagacagttacagcattaaaggacaagaattgaagctacggtcttaattagcttggcccatctagaacaaatgctcacaacctgtagtaaagggagcatcaaatcaaatctctatgtgtgaactgatgtccacagagagtgtcctgtaggcaatctatctctcacttcaccaagtagaagccaaacctctatctaggtgaacccttcagggtaagatggaatggggctccccataaagaggtaggaggcctcctttaggggatccctttggcagagaatggtgaagaacataattcaggcctgggagatgctaagaatatcccatcccattctgggaatctgtcaatcaaaaaggtttctccatgttacacaggtcttgacacatgtgtacttcattctacctggctcttccatttctcaagtgcaaacacagccagtgctaaggagaagatttcacctctctacctcaaaccatgctctacacccacctcccaactggggtttccacattgatgcatgcttcctgtcaatggtcatattcgtccatcctacttagactcagttctggacgagttctcggaccacccatcctaacacatccttactcatcccatcaataccttttgtcacttgcttttggtgtgacagccacactgccttctgtctttcctttgaaaggctccatgtgcttcctggcctctgatcctgggaagattgtttccacttcctggaaagctctctgcatccatggctgcccactaccccctgcttctcaaagatgacctgaactcagcccaagatcattctcaactcttctgaagccttcctttcactattacaagattctgcttggccagtgttgctctttccattggaaagtgagctctatctagaacccatgtctgtcttgcctatatctcttccctgactcccaccacactactgagtacacacaatgccctgtgtaaacacatttcactcccctgagtggagctacgaatggatggatgatgagacagaatttatggcaattgcttcaaaccgtggggtggggtgttgtctttctatatttgtccctgaggaacgtattcatcaagtaaaatgtgtcatctgagtttatcttgcaaagggaaaaaacaaacaaagcctgttccttcacttacatagttgagatgtatagctcagtggtagagtgcacttgcttggtgtgcatgtggccctaggtacaattcttaatctgtttctctctctctctctctctttctctctctctcaaacacagacacaggcatatacagacacagaaagagagagaaatattattatgttgtattgtgaagttaactaagcttttaaaagatgtatttattttattttatgtgtatgaatgttttccctgtatgaacatatgtacctgtggagatcataagaaattgtcagttctcttggaactggagttgtggataattgtgagcccctgcgtggatgctgggaactgaagctgggttctctgcaaaagactgaaccattgaaccatcttcccagggcgtgacgttacctttttaaattattttatgtgtatgtgcacgggtgttttgctcccatttatgcgtactacttgtgtgcttggtatgctcagaagccagaggacagcaatggatcctctggaaatggagatacagatgattgtgagctgccatgtgagtgctgagaattgaacccaagtcctttggaagacgagagagggtgctcttaaccacggagccgtctctccagtccccatgaagtaaatttaaaacaaacagacaaacaaacaaacaaatcaacctccattttgaagagcttcacaaggtgcttgaggtcccagggaaagacgatggcagtgatggtgaggggtagctgtcaacctcaactgccatcactgatcgaccattgtctgtcaaatggactaaaatctggcccttcatgttttatatggctatcaaggcagaatgtccagctgaggacaccttcttatgtaagcatcatggtggcagagtatagtcatgtagatttccctttgttcaagatcccactgtccctgtgcatattctgtggaactctagtcctggtcctggccatcagccaggaggtgtctcacctgtcctcagcccttcttcagcctcctatatgtatgcacgggttctggttgaatccagggtgaaccacttccagaatcagctgtgtgtacaaagctggttctgcctgctgctttctccagctccaccgcaagaagcaagtgtgtagtgggtgggcatctgagattttcctgtctcacactctgtggagtttcctaatgtgtccttcatcttattttccttttgttccagtcctggtgtgtgtgtgtgtgtgtgtgtgtgtgtgtactaaaaatggacgttgtggccttgcatatgctgggtaagtagtttatcactgagctacatccccagccctcagtttactttttgtgaggcagggtctctttaagtggcacaccgaccttgaattcagaatgacaagcccgcactcctaggcctgcttcttttatttacaacgcttcctaacttttcataactctcccacttctgaatttccctgctacagcctttcatctcttccctgattggttggattcttgtcactgggtcagtagggaaggccactctccaaggatcccctaggaacacactggcttgacacaggccccttccctagctggttcagacagacagaagagaagggaaccgtcagcatcttccgcggctttgagctgagcgtgtctgtgatccggaatctttacaagcagggatgacaacagctgtgggtgagcaaaagcttagggggaaataaaaagaaagacagaaaagaagaaaaaaaaataaacttgctcttaaaatcccaagttcaaagagttgccctcagttcggcactagatcgtacaaagggccccactcttgcctggggaactgggaactgaacatgattcctgcttattttctccaaacagacatctttgggggatatttaaagttcctgagaccagaatgtggtaggtaaagggagatgtcactttgttcttgttttggacactgcagctgggttcctcataaagaggctttggggtgctaagtacccccccattctcaggatgactctggatgtgaggtcagagccccaagttgaggatgagtagataagagtttggatttagagttgatgctacaatgattaggtctttggggagatggggagggaggcaggattggaacagggagtagggtgtgaactgaactgtgacccttgaaaaggcatgtcgaagtcctaaccccatcatgtcaggagatgagatgctgacgtcaacactggtacctcagaacacaaccttttttgagcacagagtttctaccaaggcaatctagttgaactggagtcctaagagtagatcatttgccaatatggagaagtctttataaaaagcgtatatggggccagtgagataactcactcacaggtgaaggcacttgctgtgcaaacctggtgacctgagtttgatcccctaaacccatgtaaagatggaaggagggaaccagctccacaaagttgacctctgctctccacacgtgtatgatggtatgtgaatgctcacacaataaataataaatacatattaaaaatgaaaagctttattgaaaattaataagacaagtctgggcatgatgactccagctgagtctgtctggtaaactaggtctaagccacttctaaaatgttctggtgcaaaaacaaacaaacaaacaaacaaacaaacaaacaaatcagacaacctggaggtcttagattcaaagcctgcctcttctgtgtatccagagctcacactgtggagagtgcacactggggagagctcacactggggagagtgcacactgaggagagctcacactggggagagtacacactggggagagctcacactggggagagctcacactggggagagctcacactggggagagtacacactggggagagtacacactgaggagagctcacactggggagagtgcacactgaggagagctcacactggggagagctcacactggggagagtgcacactgaggagagctcacactggggagagtacacactggggagagctcacactggggagagcacacactggagaagagggttctcatacctttctcaggcttagctgaggttctgtcacacaagccacttatgtgaccatgaaaggtatggtgtcagggcaggagagatggctcagaggttaagagcactgactggctgggcggtggcacttgggaggcagaggcaggcggatttctgagttagaggccagtctggtctacaaagtgagttccaggacagccaggactatacagagaaaccctgtctcgaaaaaagaaagaaaggaagaaagaaagaaagaaagaaagaaagaaagaaagaaagaaagaaagaaagaaagaaagaaagaaagaaagaaagaaggaaagaaagaaaggaaggaaggaaggaaggaaggaaggaaggaagcactgactgttcttccagaggtcccaaattcaattcccagcaaccacatggtggctcataaccatctgtaatgccatctgatgccctcttctggtatgtctgaagacagctacaatgtactcatataaataaaaataaataaatcagagaaagagagaaagagagaaagcaggggttcctctcatccagtttaattctgatactacatggagacattagaagattgcatagattgagggcttgtccctaagactgccacctcccctaagattccctgccccatactggtgagcttgggcctctgacaattgcatgatgcttgactaatcagcttagaaaaaaaaagtttactcacctttactattttttctgtttgtttttgtggtactgaggatggaacttatcgctctatacagaactatccatccccttcaacccttgatatgagacggataaagagggtgtggtggcgcacacctttaatcccagcactcgggaggcagaggcaggcggatttcgaggccagcctggtctacagagtgagttccaggacagccagggctgagccaactgagccattccatccaccccaaatgcttctttttggggaaatttcattgtaggagcttgaatgaagccttaaaaaaaaaaataccaaagaaaaaagaaaaccctgtatgttgaaaacatgagctgacaaagaggctactctaaagctgataacctgaggtgtcctcaggaaggcctcagctcacatcttcctggccctttcctaacccctcccccagtaagggaccttctcaaacacaaggtcagagagtttttgtgcagctcccagacagaggtggaagaagttggctttgggtgttgggtggcctgccttgggaagggactctcaagcaggatctaaggggagaacacgatgcatatatgtcaagacatcacagagactgtgcacgtagtgtggtgctgagcagacgtgagggaaggagaatttccagctatttcttcaggttgcagggctgggcacttttagcttgaagatgcctttccctctgggggtcccatagtcactgacagggactgttctttcattgtcactctttgttgagatagactctgttatatatagctcagggtggtctgtagctcgctatgtggcccaagttggctttgaactcatgatcctcctgcctccatttttgcctggctctctttaactcctaatatgacaggtaatggacaagtggtccagagattctgagtgatggtgtggattgaatcagggtgttgagggtctacgggtacccttccaggtaccccaccaccaccacacacacacgcacgggtttgtcaggtagaactctctagaaggtacttgtgagggaagaacatcagctagtgcatcaggcagctgccggctgatgggtgatctgagcttctttggagtggttgaggcaactctgggaaggaaacttggccagacagtgggtgacagctggggcaggggaatgtccctatcaccccagcaaagaaactagctatgccctctttggggctcacatatcccccctttctgtttcaggccccttggtgccccacatcccatctggcactggagtgttgcctgtgggttcaacctgctgataccccgggcttgtaaaaacaaacattttcaagctttagataaacgatttgattttatacttaatcatattgtaaacattcaacttcaaggcctccaggtaaggctttttagaagactttctacttctagatcggtctcaaataaccaggaacagccctcccccacacaacctccttggcacacacagctctgggcctgtgagaacaaaagcagcagagcctgacctaaaacagctgcgggggtgtggtggggagggtggggaggtggggggagggcgggtgttggggtgggagtggggggagaaggcactagatcagaggtagcttgtggggcaccatcatgcacccaggcctgtgaacatgtttgacagacataggaaaaagagcttgagctatagactaatgtataggaaggccaaggcagtcagagcatttagaatgaaaacaagccatagaagccatagaagctgagggcgtggctcagctgggagagtgagtgccaggaccctggcttcatccccagcacccccaaaccaggagaaataacaaactaatgtcaccccagcactgaggaggtagaaacaggaggatcgaagttcaaggtcattctcccctatatcaaaagttcaaggccagcttggaccctataggggcctgtctccaaaaccaaaccaaaccaaaaataacaacaaagacctgaacatacctcttttttaaaaaaaaaaagatttatttattattatacataacaggctggcgtcgaactcagaaatccacctgcctctgcctcccgagtgctgggattaaaggcgtgcaccactgtgcccggctatacataaattcactgtagctgacttcagacacaccagaagagtgtgtcagatctcattatgggtggttttttgagccaccatgtggttgctgggatttgaactcaggaccttggaagagcagtcagtcagtgcccttacccgctgagccatctcaccagcccctgaacctcttgtgccagttcacagtgcgcctctcctgagttttctgggaacttcttgagcttcagagagcaaacctgcaataggcctcaagtctcccagaccagccttctcctatctcagtcctcaagtgaggttctgaggagcaggaggtcagctgccccgtgtgacctccaatgtctggactgaatagtgatcaccggccttgtggcatccaggaagtggaggacctgaattgaatttcatgtcccagaggaagagtctaaggcgtaggcagcttaaagccaatccaatgccaacatcacgctgtaggcttcatctgaggttagttggagcctcacccaaggcacacctcaaggcttacccaaagtcaacaggagtgtagatgaggctccaggcctcagacacacggctgtgcactattgccctgcttgcttctcacggtggctgccggcagctgtgggtgacatagttcctttccccagctgtcagagtcactccctcctcttgtgtccttctttcctcatacctttatttatttacttttgagactatatagctcagactagcctcaaactcacatcctcctgactcagatcccaagtgctggcatcaggcacagtttaattataggagaacccttgtgcagatgctaatgcatgcttctagacaagcagttctcaactcgtgggtcactgcccatgtgggggtgtcaataatactttcacaggggccgcccgagaccattagaaaaaacagacatttacttacgactcataacagtagcaaaattacaaattttacagttaggggtcaccatgacaacgagggactgtattgaagggtggcaacattgagaaggttgagaaataccgttcaagaccatttcagtctgtctcagaaacaagccgtttcccccatgtgcaggtagaagcctatggttaaagttgagaattgccctctattgttcttccacgttattcactgaggaagggtcttcccttcattcgctgagtcagtctggttagccagcttgctctggggatcctctgtctctgctctttcagggatgggatgccaagcctctactgattggggtgacagcactatgctgacagcagctatactgagtggtttttatgagggttctgggggacttaaacttcggtcctcatgcttgcatggcaaatgatttatctgctgagccgcctctccagtctaagaaagcttaatgtttaaaaatatttttaaattagatttgtttatgtgtatgtgtgtttttaaggcgcgcgcgcgtgtgtatgtgtgtgtgtgtgtgtgtgtttgtgtgtctatgcctgcagaagccagaagagggtatcagatcccctcgaactggagctataaatggttttgagcttccaactgggtgctgggaaccaaactgcaagaggctcaagtgttcctcagctactgagccatcactccagcctcctaaaaggacttttttctttaaatacaaaaaaacaaaaacaaaaaaaacaaaacaaaaacccaacaacaaatcaaaaagcaactcacagagactaataaattcaaaattcagaataaaatccttaaataaagttgcatccaattaaacaggtagagtcgttggtacctggggagacagtctagggagacatttggtcagtaaatgctttgaggccctaactttgatcgccagaaccaatatacaaaagccagctgtggtagtgcctacttgcaacccaagcactagggaggggcctaattggtgagttccaggctcctgagaaaacccagcttataaaataagaaggcagatgattgctacaaactacacctcaggttgtcctttggcccagacacatatgcacagacgtgcagggattggtatgatatttgtataatttgtcattggttgtaagtcccagtatttgaacatgtttataaataacttgtttgtttgtttagaagtcctgagcattgtggttttgtttttttttttttttctgtttcttctctttgctctcttccttgaagtaacacgagcaggtctctcttgaccatgcacatgactgagagtccatttatattgctcagaaaaggcagctcatgctgatgggaaaatgacagagaaaggcctcatttgtgtttttgtctcagtgaccatcctgtccctttgtatcttcccagatcacatggcaaaggagccagtggaggacacggaccccagcactttatcctttgccatggtaggtggcaagtcttgactctttatgccttgctaggtcacacggtgctcaccaaggatttccaagggagatcagaaactccaaagtgaggttttccaaagatacacatcttatatatggcatccactgtggcgtcagcatttccaggccaaagagcagtgttaggtcttctgttggggatgcgattccatgagcagagtgcccacccagcatgcgtggaaccctgggcttaatccctggcatgacctaaactcagtaagatgctgcatacatgcaatcctagcactctgtaggtggaggcaggcgatcagtagtacacagtcatcttcagctagatagcaagcttgaagccagcctgggctacatgatacctgctctgaaacagcaacaaaatcgtgttagacccttttcctgcttcacgcaatccataagtgatcttcctagatgttcctaggtctttggtgtcaacttttaatactgtctatttttagttaacttcctttaaacactgaaaatatctaacatggaatcctgtcccgggattcaaacccaggacagggagtctacagtagtaattattgcccagaacgcgtgtgtgtgacatgaccatcacagaagtggcaagaagaagcatacactctaagaatgcaccaagacaaaccctgagcataacgctgcaggaagttgggaggaagaatagcacagcagagaagagaggaagtgtggtttagcggttagagccaaggaagttaagagggggattcttctgtttcatgttccaacattaacctgtagactctgacatcagctcagaagaaaaatagtgagtcaggcctgctgataagcctgaggctaaagccctggaaggtttaattttactccatgctgcaatcctggggacaacttctggggccttatgcatgcgaggcaggccgatgagctagcttaacccagcctgcctctgaaacccaacacaaagctctctgttcactttgatctcaaaactgacatttaaaaataactctctgcttttgtccgtttctgcagtcagacaagtatcccattcaagacaccggcctccctaaaggtaagaacagttaacataaggatgtctacttgtgactaattgagtatcaggaacaaagcgctactcaaagtgcagtttcccttactgaagatagtaaaacagaaatggaccagtaacttaggttgagactagctacacagttatcctcaggaatgaactttctagttaaaatggatcaatcattttataccagattatacatttgaacttcatatggtgtaatcaactacacaaagctggccaggttctatgttcaaataatgtaagtgactcaaatttgtttaaggagaaggggaggagttgggtgaggtgactcatacctgcaatcccagcatttggaaggctgagacaagagactgctaggagtttgaggccagcctgggctacgtaatgagttctaggccagcctgagctatagagtgagactttttctaaagaccaaaaggaaaaacaaaggggaggggaggagaaggaggagggagaggagaaggtattgaaggaaaagacttattagttcaggggtttcaaggggcttttggagccccacatttacaggagctcctggctcagccctgggcctcgtgactctgctgtcttgctgttgggcaggatttcctgctgaggaaagaaagagggacctcagcatcggcagcacaccatcatgctgttcaagacggtggtgggcagagagcctctccagaaccgtgatgcagacaggcagtgggggtcgtagtcccatctctgaaccagtagttaccatcaagaagatagggaagcaaatggtgatggtggtgcacgcctttaatcccagtccttaagaggcaaaggcagaggcagaggcagaggcaggtagctctctatgagttcagggctagtgagttccaggacacccagggctacatagagaaaccctgcgaagaagaagaagaagaagaagaagaagaagaagaagaagaagaagaagaagaagaagaagaagaagaagaagaagaagaagaagaggaagaggaagaggaagaggaagaggaagaggaagaggaggaggaggaggaggaggaagnnnnnnnnnnnnnnnnnnnnnnnnnnnnnnnnnnnnnnnnnnnnnnnnnnnnnnnnnnnnnnnnnnnnnnnnnnnnnnnnnnnnnnnnnnnnnnnnnnnnnnnnnnnnnnnnnnnnnnnnnnnnnnnnnnnnnnnnnnnnnnnnnnnnnnnnnnnnnnnnnnnnnnnnnnnnnnnnnnnnnnnnnnnnnnnnnnnnnnnnnnnaaaaagaagaggaagagagggggaggaaggggaatgtgagttagctcaagctccaactaggaaaggcttacagtagattttattgaaaccccagtaatgttctgtggccagacaaacactaagagattcttgtcaggctagaaagtcacccccaaacttatcttttgtaatccacagcctcaaattcaaacatggtaaggatcagaaagtagacagaccctagccttttgtggctcagccccatggggtgattgcaaagccatcatgcttgtatatcagaacactgaccttgtacctgtggacaatgcagagataaaggcacagggacaatcagatcatccagatccaaaggaggcagggagggcacctggctgctttgtctttgtgcagaggcagcctatggaaccccacccaggtgggcttcctgatatgtctctgatatcgagaatggaggagagcttcccaccagggcccccagtgggcaagtccaggtttcagccaaggcactgcgctctcccctctctggtgtgagactctcctgtcccttggtgtgataccattaacacgtcagtccttttctaagtgactgtgggaatgggggagaggccaaagcctgacttgatcacaaaccatggctgtgcttggcaggtttccagcaaactcccttgccctgcaccctctccactgataacctgttcctcatctagtgcttgaattttctagcttaattaattgttaaagtcaacacacaaagtgatgagtttcatcatggcaataccttacatatgtgtcattatactttagtctaatttttctcctcccttgctgtctcaccccatgtttcctctagttaattggctccccccacccaagatattccctctcaatttcatgtcacatgtattttattaacctcctccatataccccacacacacctgtggcactcaccctcaacatagatagataggtagatacatacatacatacatacatacatacatacacacacacagatacatagctaaatggtttttttccccaaagagttgaatgtggtatcatatgcttgcattccattgctgaggaaatggagacaggcatatcttttttgtcttgctggccagcagcctaacccacccagcacacacacacacacacacacacacacacatgtgcatgcacagataaacacttttaaaaaaaagaattcaacaaagaagatccaggtttctggagcctgttctaaggagcatgagcacgggacaggggtggagggagcgctggccaaaaccccgcagaaatcaggttagcattgtcaagcagaatggcctagagggtacacttggatatgtgttataaagatcttttcttctttgcccttgaatgtgatttcctgttttgaaaggaaaagatcactacttagcaacccgatcctacacctgaaatatggtcaggttgctcctagaatctgagctctatacaacttttatttgagccccgccttgtgccttcataggaagcatgactttgaaggcacacaacagaccttccctttgttctgtgccacaggaaataatataaagtgcataatttttaaatactccaaataagtgcacgatttggaggtaaatgaatcttggttagaagctttattaaagtttcaattcaataataaggcaattcaatttctgctggggtttcccttcatcttctcgaatgaggacgccaccaccgttagcggtttctaatagttttctcatgggatttgttttttttttttgaagagaggggagtggacgaggacagcctgagggggagtaagaacgaagtataatgaatctatgtagaatgcagtgtgaagaggcttatgtaggaaaatgtgccatggtgacagctcctactttgtatgctgactaaaagagttagtaaaggggttggagagaaggttccgtgcacaaagtgcctgctgaacaagcataaggaccagagttcacatccccggcactcataaaagacagccgtagggatttgaacctgcaaacctaataccagctggtggcgcagagaagccagcctcattgaaatactgagctctggtccagtgagagaccctgcctcgagagcaataaagcagaaagaagaccctcacgttaaccttgggcttctgcaaatgaagacctaaacacacagacaaataatttttttagaaagagagttatttttagaaatataaaatccatataaaataatttataagacactactttgtgggcctaaaaataatctaaactgcaatctaattatattaagtatcagctaggattctggcattccagtaaattgggggtgtctagtttacttaatactggagtcatgggtaattagctttaacaattcccctacggttgaaaaaggcctcaaaactcattttcctaaataggttaggcaagcttcctagcatctgttatcctgtcacgagagagaggcctacgaggcctacatttttcgagagcggcttagagctattctttcatgcaggccaagctccagtgcttttgaatgctgtggtttagctgtaagtcatgtggaaatctagggtaatttcagcgatcagcatatgatttatcacacctgctttctcatctgggacaaaggcccagctccctccagagtcagcccctcgctctggctccacaggtttctgtagtgcgctctgctgggtctctctcttctccagcagctctgcttgacttccacgaaactggggactgggttagcctcttttcttgttgcgaagaccaaatccctgacaaaagaaggctttattttgcttaaagtgtcaggatccagttattcacggtggagaaggcacagcacaggggtgtggcacagctggccacattgcctctgtagtcaggaagcggagagagcaaacatctggcacttagcctgcttctccgctggtttctgtccaggacaccagcccatggggtggtactgcagacatttagggtccttcttccatccccaggcctttccaggcaaattctcatgagcacactcagaggtgtgtttacatgagattacaattcagtcaagttgacaaagcagccgttcaggaacctcctgacttctcacagaaactgccaacttgagcatcctgaggagagcgtgtcttcctgtcacatttgaagtgtgtttggggaaaatagttcctacttttcaatgagtgttcacagcagaagacacctgcacaaagataagccctcatataaatcaaggaaattgtggctggcttgttggtacaggcctgcatacaagttacttaggaggctgaggcaggaggagggagggtgcagggcctgcttaggttagataatgaggtcaaggctattgtgggcaacttagtaagatgctgtcacaagcacggtaaacaaaggagcctagagacaagctcagtggcccagcatttgctaagtgtgtttgaggaccttatttagttcaactcccagcccccccccaaaaaaaaaccctgattattttctttggagtgcctctcttttactgttcaaaaaatgttgccgggcgtggtggcgcacacctttaatcccagcactcgggaggcagaggcaggcagatttctgagttcgaggccagcctggtctacaaagtgagttccaggacagccagggctatacagagaaaccctatctcgaaaaacaaaaaaaaaaaaaaagtcatagtaaattaaagatgcgagggctgatggctcagtggttagggatgcttgctgctgttccagaggacgtgagtttgcttcccaacacccacatcaggcagctaacaactgtctgtaacttcagctccaggggacctgacacccccttctgccctctgaggacacccacatttacacagacagagagacacacacacgcgcgcgcgtgcgcaaataaaaattcaataaaatctttttttaaatgtaaagcgtaaagaaaatggggtagattgagtcttttattttatttatttatgaatctgagtgcacgtgcatgtagggaagcacttagtgctgacattgcatccctagcccagggaattggaactttgctcccagcacacacacttcatttaattttttttttttttttttttttttttttttttactgtgatgctggggacccttaggcatgctatgctaggcaaacactatgctgctgagccacttcctcccagcctctggaacgttcattttacagcctcagcatcccccacatgtagccgctgtaaggaacaaaccctcgatggtccttcctccagggactagccatgggtctcctcggtctggcctccatccagttgagtacttctgtttgtagcctgggtggggccatccgactcctcgagggtaagacttgctctttgggtatggaagccgcaatgttgaaccaagggcaggtgtactggctgggagagcattggtagccaatgccctgcctctttgctttttggatcatcgcagggtcctcagactgcctaggctgtggtgatggaaacagccatgaatggacaggcaggtcattacccttcactggatcacattgaccaaggtgccttgagaaagcctttcctactgtgagcttcctaaaagctgcacctcatcggggacactgctggacagtcacagatcacatctagaacaaacccatgtacagatggctcatgtgaccaacaggcattggacaaaccagaggatcccgtagaacccaagcagtggtcagtcagggtactatgctgactcctataacaagtgggtatccagagactaacctgccaggcctcctctctagccattcaacaatagttttcatcctgggacaagagaaagcctcattgtctcacataagttcaagtccgccccagacagccttcaccagtgaagttagttagtcaagagtggataatttattctcagcaaatgtccttggtcatggactggtctattctattgatcaggaagtagttttgactgccttctctgtaccctgttgatgaaggtgggttgatggggctagccaaacacatggtacctggttggacagaggaaatgggatgcagtaaagagtctcatatgtctgtagcctggggaacaaggacacctcagagtatatagaaccacaccagattgcacttaggaacatgggacacttggagtatgggctgtgagagtcaagatctgtggaatctccacagtggggtgtctccagctctctgaaaaggctattgccttgtttgaataattctttgtgctggtagtgactggagtcctccctctccaacaccaacagagtcatgctcactcctcccaagaggaacattacgtaactgggtgaagagttgggacctgaatttgtccttgttcaaatccatcccaattttaccaccatcgaggcagctcttatactgctgagttttaattgtatgtcttagagtggagtgtgtgtgttccttactaagctgtctattgttcttccctcacacccctcccccaccccagctaaagagtgtgatacagtcaattccaactgtccaccaaattctgatgaccaacctcaggtaagaagcattttaactatttgttaaactgtaaatgcctaggacttttataagaatgaactgaaaagcattaaagataaaaccgaggatgggtgtactggggcatgccctaatccctgcattcagagttcagagatgaaagcatccaggcctgaagatcaaaccatgctatgagagatccttctcaaaaaacagaaagtgatctgggatggtggcctcttgaataatgtgcttgcttcacaagcatgggagacagagtttagatccccaggccccccccccccccggcccccgctccgtgttaatgcaggtagatgtggtgggctgcctgtagtcccaggaacagcgggtcccaggactagtgggattgctctgagagcaagtgagaagcctttgatacacaggatggagggaggtggcaggggaaagggacaggaccctgaatgtcaagctcaggccctgtctcaagaaacaagatggggagtgcctggtcccttgctcacaccttcttcacgctcactagcagacttgcttacagtgagcctcctgagctgcagttacagcgttgtgtatgtcagggtgcacacgtttaagacatgttaaggcctgtgccttctcacaccaagctgagccctagcaaggtttgcttggcgatgctttaaaaaaacaacacaacggctggccgggcgtggtgccgcacgcctttaaccccagcacttgggagacagaggcaggcggatttctgagttcgaggccagcctggtttacaaagtgagttccaggtcagccagggctacacagagaaaccctgtctcgaaaacaaacaaacaaatccaacacaacgttttaaggaagagctagaaaaggccttgtcgggcaaaggactgaaggtttggctaaggtgggctgaagtgtgttggaggttggactgataaacaggaaagtagcttctcttggcagtggggaaaaagaagtgttagcaggcattgaagactttaaggcctcctgcactttgagaacagagggtctaattgttggactggctaactctggcttttttcattcagggaaataacaacccacaatcaattattttcctagaattgaatttaggtgcacaggagaatggagttggaagtacagagatttcccacctaacaccttgcccacatacgcagcctcccacaccccaacatcctctgccacggtggcacagttgtcactgccagcgcacccacactgacacgtcatcagctgcagaccagtgtgctcgttaagttcattctgggtggtgtgcatcctgtggctttgaccaaatcactagtgccgtgcacccaccattgaaagctcacacggggtaggtgcactggaaatccttggtgctcagctgctctcccctggcaacctctgaccttttcctcctttctatggcttgttttcctcagaatgttagagatgaggttacaccataggaattctcgcccttaggaatatgcatttaatcatctctgtctcttgatggttcatattccattgctttctttgtgtgtgtgtgctgtgtatgtgtgtgtgtattcacgcgtgcgcgtgtgctgtgtaatattccagtatctggataaaccattaattatctatttacctactaaaggatatcatggttggaagaagtgaatcattttgctccattttaagtatggggtgtgtttagagcttgtcaaagagtcatagatacataggaggcactaggcccttgcttcctctagctggccactggtaccagcttgcccagatgatggcagcttatcctgggttgaaaggttacagggatcctggtacatggctgagccataatcaaaaaaggaaggaatttcaaccctcggggtatatattagataaacctttgcatccagaaccgataggatgggaaattggggtagggtggggggatgctctgctaaatgagtcctgagactttggaacaaaggagacagagctttttggaggtcagagtctttaaaaagtactgttctgccctaactcagtggtgctagccatttttgccttttctccaggctgatgtcagtttctataggacttgcaaaataaaaactacttcactgtctttagtctctcacacttgtcatgtcagagtgaaggtcttggctcccacagtggatgcctcgaaattctgccacttaggaaaaattggctctgagcgtcctcgtgaagatttgggagtgagaaagttcaggggtttttttttgttgttgttttgttttgttttgttttgttttgttttgttttgttttcgagacagggtttctctgtgtagccctggctgtcctggaactcactttgtagaccaggctggcctcgaactcagaaatctgcctgcctatgccccccccccccgagtgctgggattaaaggcatgcaccaccacgcctgaaagttcagttttgtaagaagccacagtgtggcttgcagagtgacagcttcgttctgagctctcaccagaagccaatacagtccagctgcctcacggtctctagcaatcgcctctcaggatttgcatttctgtgaggacagtgatgtgggtggagttgtttaatatgcgaattttctgtttgtatattttattttatatggagtgtttagggattttgtttatattttaaagacgtactgatgtgtgtgttttgtattttatgtgtgttttgcctacttgggtgtaaatataccaagagcatgcctggtccctgcagaggccagaaaatagcttaggattccctggaactgaagttacaattctgagctgttgatccatttcttgagccctagtttgactgttttcatattggttctttgtgtccttattgttgttgggttttcagcgttctctgaatattttagatagttcattattcaaagtatcttttgcaaatattctctgctggtgtgtgggtggtcttctggcctcctccccctttttttgagagagtcctttacagacattgagcagacagtatgattaatgaatccagtctgttaggtgtttcttctaagcgttgcgcctttagagttgcacagaaaaagccgtcagcacacctcgatcatgcagattttcttctaagagttttacagttgcatgttttacctggtggtctgtaatctgttccaggtttgtggaacatacaaggtcaacgtttcacatcctcgatcattagctgacagtgtttacatatgtgtatttctgtcaccccactctcttcctgagtaccttgtcagggctgccactgagatctcttttgccccctctttccagctccctgaacctcgtgatttccactgaaacaattcatctgagacccacagaacatagtgtagaagacaggtagggtttactatagaatgaagtggaccatgcttaagggtataaaggaacagtggcctccgggaccactgaacacggaaatgctctcacaagtgaccacaggacaggtcaccactgtgccagcctacatgttgacgtaaactttatgctcttatttaaaagccgctagaacacacggctttcctggagggcatttagctatctaagtgtttggcaggccatttgaatcactattttgttttatttcttttaattaatgaatcctacaaaatgataagaccgggaagacatttcaaaatataatttgtttttgttgatcctccttccttttccccgtccccacttgtgcctccccacccccatctttctttttctactttcaaatcacgtgtgttctattaccctcctctctttcataagggaaaggacagcggtacctatttgttctttacttgaaagcctccagaaaggcaatgaccttgggttggggctgggatcccactggtagagccctttgtgctgtgtagaaatccctgggccccatcccacaaccacaggaaaaccagcatggtggcactcacctgtaatcgattcccctgggagatggaggctggaggacctggaagctcaaggtcatggtcaactgcaaagtgaggttggggagaccccgaaaaactcaagaccctgtctgctttggtgggtgggtgggtgggggatacattctataatcctcttgactgtttagaacatcgaggctctacccaggtctagagatcattcaaatcctcgttttctgacgcatgaccggaaccttgcagttcccatgcctggttttataaggccacgatgctgaagcctggtctcagacgagattcctggaaatagcacactgtcttgataactgtagcttgacagtgtgttttaaagctaggagatcgcagcccactcctttcctccaactgattattctgaatggggagaaatacactttcagtatcaacttgtcaggattcaaaaatgctcgcaagggctttgtgttggattgaatcgactctgtagatcaccttgggaagaactgacagcctgtgtcaatcattgctgtttatgatttcttttataaatggcagacaccatgctctttagacacctcctctacactcctgggtgtggcctgacttcttacagtcctggctatatagtccagtatgttttgcaaactctacacgatgaccctgggatgaaggccatacggatttattaagtctttaccagattttctaccaatgacaaaaatgcagtataacagaatagaaaaatggcctatccgtgagattattccactgatatccatgtagtactttctagtaaatgaaaatctaatttggcttcaattatacattattctagactcatatacgtgtacaaggtggcatcacctgttgtaaatttgacctaaagagttagtaatggcctatggttgacccaagctctttagggacaggccatcctgcttagctttgccattcccacactgcccgcagccacctgacatttctcagttggtagctgttggtgtaccagtccacacaaacctagagagactgtaagcctcccaccccaccccacccccgccttctctgaagggcactgggctgaaagaacagccccgtgtgggtgctactgggactcacctggtaatatagggtgtattactttctttttttcttgttgttaccaaaaacctaacagaaacatcttaggagagagagaatttgttttgtctcatggtttcagagatgcagtccgtgaaaacttggacttcctggtggtgggagtgtatggggccagctctttacatcacggtagatcagaaagcaaagagctagcagcccaggtgggtgacagtgtacaaaggcctgccctagtaacctaagtcctccaagctaggccttacatcccagaggttccacggccccctcaaacttggctcccagcatctaggaaccaagtgtttaaacacgtgagtcgggaggcaacacttcagactcaaacccttacacggggcttgttcctttctttgcactgggttgcaaggcactgggtagaactctagccaacagcctcattgccttggcagagccatgggctcactagaagatatgcagatccgaagccattaagtgcacggtaataacagggcacggcagggaccagccaggctgcagatgctatctgccattactcagcctgccaggcccctgcctgcaatcctggacacgaaacaatcctttcaagctccaacaagatctgtttcatagattggtgggtccttgagctttttttctcggagggagaaatcagacagctctagtttgtttggtaattgcttactttagcgtggagtttatagaacaaggaaccaaggctaccaggtaagactgcaggtctccttagactatatacacggtatttctaactctaaaaagagatgcattctgttgcctgccagtccagataatccatactttcccttaaggtgggccaaaaaggtctcttgagacacagttgtctgggcatcttggaagagacaaagaatttcaaggggttggaaattacctgctcagcactacagagcctttccatctctctacctcagttgttcatagttgaaaagcatctcatgtcagactgaagatgctacctttgaacttaggcttggtgttaaaaatacttaatctgcacggcaggatggctcagtaggcagagctcttgccaccaactctaatgacttgaattcagtccccaggagccacatggtaggagagaatccagacactgtcctctgacatccactctcatggcatttgcatacacatggacacagacagacagacagaaacacacagagggatagaattaaactttaaaaattaattaaataaatgaaaatactcaagcctggtaaaatggttaacacctggcatcttagcacttgggaggtaaaggaaggacaatcagtccaaggccatcctcagctcgttcaaggctagcctgagctacatgggcccttgtctttaaaaaaacaaaaaacaaaacaaaacaaaacaaaaaaaacaaagaaaagcaaaggaagagaaaaaaatagaggctggagagatggctcagtggttaggagcgttgtggtctcttacagaggtcttgatttgattctcagcacccacatggtgcctcatatccatctgtaagtccaattaacacagatctaatgacctcttctggcttctgtgagcctgcacgtgtggcatatataaaaaacaatgaaatgatctatgtttttaaaaacccaaaacaacaagaagtgaacaatagaatttctctttccatcttttgataagcaagataattctgtcctaatccaatggccatcagattttatctcctgctggtgtctaacttccttagagaacatcagtttactctttctagactacagttgtgtacccagaccttgaccttgcaatagcctttgcactacccatctggtggtctggtcctgcagagttcatggccttacggggaagacgtcctgcagttaacactctgcagtttttctttctgcccagcgttgcttctctctgcgggccccattgctttttgtcactccccgcacctcccttgtttgcccttctgaacttgcccgtagccatagaaagaagttcttgtcattcccaggccaacagccctccggggcctgatgctgatccaggtgaatgtcctggtcaggcattttgataagtttggggacctgccttgtcaattctgaggcccactgtccctatttttgattcctgagaaaaatggaataccgaccttggttcgcattggtgccacaataaacccacagtccccaatgtcacccactgtttcagagcaggggtgctttttttttttcctgtaatgaagcttcccagaaataaacatctaaaagaaaactgtggtatttctgacttgatatggctcattaaggccaacggctttgacttattactattttttggaccaagtcaagatcaaatatttgtggttagccaggccttgttagagcctgtaaccctagctacttaggagactactacaggaggatcaaaggttagaggttggcctgggctacaggatgagttcaaagccagcctaggcaacttggtgagactctccctcaaaaaaattttaataaaggacagaaataggactcagaatatttctcactggtagagcacttatctagcatgtatgaggccctaggttcaatcctttgtacgaaaaaatatatgtgcacatacatagatagcgcctagtgacacacttcctccagcaaagcctcacccactccagcaaggccacacctcctaatagtgccactccctatgggggccatttattcagaccatcacagtatatacatatatgtgtgtgtgtatttatacatgtacacatacacacatatgtatacacacatacaggtgctgggattaaaggtgtgtgccaccatgcccggctccaaaaatatttttaaaggataataaaatattttttaatataagaaatagttttaaataataaataaaatatttaaaatacattggaatagtcatctaaatgtaaacttttttacatattaacatgtgaataaagtagtctttcttggcctcacacactatcatgcagctcaggaaaagctcggagcaaccagtgtgtgatgtttttattttatttatttatttatctatctatttatttatttatttatttggtttttcgagacagtgtttctctgtatagccctggctgtcctggaactcactttgtagaccaggctggcctcgaactcagaaatctgcctgcctctgtctcccaagtgctgggattaaaggcatgcgccaccatgcccggccagtgtgtgatgttatacacttcactacatggccgacaagtctctgttaccagcacgttaccagcatcactggtattacaagcctggagtttgtgaatgaaatagatctaaagagacatcaccacccctctttaatatccatgtcctgtggtctacctgtgtttgcatgcactgactgtaatctcctgtgaagtgttctgtgatattcctgaacaataaccagctctactccatacacaaagggaaaacccgtgatctttcatctctgcatctgtgagtttggaattacactcagtaccctggcctccaggttccagcaacagctaaggattttgacccacacttcaacgccagctgtggcaggctcgtgtcattgtatagaaaacctgcagaggagaagaaagagctaagtgtacacagacctgcagatttgttctcatctgagcaatgaccgtggcgtttcttccaattttttgttcttctgcagatttttatcctcagtgaagaaatccctgtgctcagcctcacttgagtccctgcccactttcatgttgtctttttttctctctgggcttttaacacaggactcctgagctcttgatatttatgtgtacagccaacatcatattaaatggagacaaactgaaagcatttcctttaaactcaggatcaagacatctattctcccctctcttatttaatttagtgtttgaagtcttagcagttatacacaagaaaggtataaagggaataaaaatgtgagacaaagaagtcaaactatccctccttatagatgacatggcattatttgaatggccctataatatctactagaaagttcctttagctaaagttgcaagatacaaaatcactataacatataaaagcaatttcgggctggagagatggctcagcggttaagagcactgactgttcttccgaaggccctgagttcaaatcccagcaaccacatggtgtctcacaaccatcggtaatgaaatctaacgccctcttctggtgtgtctgaacatagctacagtgtacttacatataacaataaataaatctttttaaaaaggcaatatttctttcatatataccaacaatataccacagagaaagaaactaggaaaatatattccattctaggcagctttttaaaaaagtacctagcagggctggagacatggctcggtggttaggagcataaactgctcatccagaggtcctgggttcagttcccagcactcacatggcggctcacagctgtctgtaatttcatttccagaggatccaacatatagacatacatgtaggccaaacaccaaatgtacctttaaaaaaatgtaggtaggggctggagagatagctcagcaggtaagagcacccgactgttcttccaaaggtcctgagttcaaatcccagcaaccacatggtggctcacaaccattcgtaatgagatctgacaccctcttctgaagtgtctgaagacactgtggtgtacttagatataataaatacataaatctttaaaaaaaaaatgtaggtaggaacacacacctagctaaagaaaaagacctgtacaatgaaaatttcttgacactgaaaaaggaaatcaagctactagacagtgggaagactttccatgctcatagactggcagaattcatattatgaaaatgattctattaccaaaattaacgtgcagatttaatgcacacttatcaaacttatgatgtcacatttcacagacctggggggggggtaacaactcaagaattaacatgggaaaacaaagactacagatacccacagcgatttcaaagagtaagaatacaacaggagacatcacagtacctcagactgtagagccagagtgacaaggtcagcctgagaacagacagagcgatggaacagaagagaggagctggaagcaaaccgacaaagctatgccacataaatcttgacaaaggaagcgtaaatacacagtgggggttggggggatagcgtatttcataaatgccattggtaggactgaccctccaccagcgtaaggatggaactaggtttatggtgtttaacttgtaagtacctttacttaacccgtttactgaacacatcttcatcctttttgtctggtctcctttcttggcttgccctcttttctctttcatgctttattgggtgacatccacacttgcttgacctttctattctgctgaggatctcttccacgtatgtgcctcttacctccttcttcctcttcctgagggctaggattacagacttgtgttactaatgcccattttatgcaacgcttggggctcaaaccctggggctgaggagagcgccctgccgactgaggtacatcctcaaccctgagctacacctattttgagcacagcctctgtgctcagcactagagatgagaaaatgaataaacagagctgtgacagaggcgcaaaggagcaaaggaaggtatcagagatggtgataccatctctctagacacaggagtgaagaagatgatggcttaaggccaatgcacagagccctgaggatggggctactccactgactcagcctgtactttgtgaactaaggggacagaatggggacctgcatcaggacctgataaaactcaagatagacagtgggtgtatttgatggggttctctggaggaacataactggcagaatgagtacatagcaaagagggatttagtagactggcttgcaggatgtggtctgagtagtccagcaatggctgcaggcctcggcagtcccaatctaccacctgaagggttcttggagaggcccagagcttcttgttgaaagaagctgttttatcgacctcagggaagatggcaacagaggcagcaggaacagtggcagcaacagcacagtagatgaacttgctaacaaggcatgaagccagcaggcaaaaagcaaaagtggttcccttaatcttccttctatctgaaccgcaggcggaaggtcctgcccatatttatggaccttatgtgagtcttcccacaagaaaatcccttacaggcatgcccagaggcttggctcaagggtgatctagagtctgccaaattgacagcattaaccatcaggaggaccctaggatgagcagagagcagggagatcagctgacatgaatgtgtgaggttttgcagtttagagcaagatgggttggagtttgggagactccagggattggccaggggcccacagttatcagacaaaatcagcacacaaccaggaatgaaggctgttatgtgaactcatcctggggagacgtaaacaaacatctgctaaccccagtcagggcaccaaagccacaaccctttccaaggggtgaccggacttccccatgggagcatggacgagagttggcttgcaggagtatgggtggccccagagcttctgacactgaaaagtctcaccccaacatgaatgacaacatccttatagctatatagatggagtcccctcagttaagcttccacaccccatatgatctagcatgtcctagaacagaattacatatagctgtcgagggtgtgtagagtagactggctgaatcttaggtgaccctcctacaacctctctctatgggaaagatcagtaggccttgagggtcacttagaagtgtcacagttactctcacaaaggtggtaatggctgttatactcccaagactgcttttttttttttttttcgtttttcgagacagggtttctgtgtgtagccctggctgtcctggaacttactttgtagaccaggctggcctcaaactcagaaatctgcctgcctctgtctcccaagtgctgggattaaaggattaaaggtgtgcaccaccaccgcccagctccaagactgctttctataacagtgattcacctgtaatcttggcatcaaggagctgaaacaagaggacctcatatttgaggcaagagaaaatgtagcactcaggtgcttagcagtgactaagagaataggaatggaggctcgacccaaggagggcttatatatttgaggccccagagcaggcaggaatggagaagtaaggagactcgtgttaaagggcagcttgtggaatggtctggagaagatagattccaatcccaaagcctcgggcactgtgggtgatgctacaggatgcagtgggaggacccaggtcgcagaacccacacgggacatttggagaaagcccccaagcagaagtgatgcgtcagctgaggcctcatgagtgtggtggcaccgcccacccagagaggcttttacttccactgacataaggcctctcaccaggtcttacccttacctgatcctcagaccgggtgttttcccagcaactcaggagggtcgtcaccttctatctgaccctgtctctgttcccctcccacctgggtatttgggtgatgctggaggcagggacctcccagctggctcccgactgcacatcttcctcccagaacctgttcagcatacctgcttctctcacttgctgttgtctttcctaggaaccagtctttcccactgctatcagcgtctcggggctattgtacatggacctgccctctttccttttccatagcctcttcagagcctgccctgccctctcctcatctcctttgctcatctcctagtgatatcttcacttctagtcctctcactccactctcccctcccagattgagagagagtttgtatcctctgccttccacatgtcctgtacctgttaacactgtcctgggcactccctgcttccagtgagggtctgtagtgagccctaatgtctatagacagagtgcagctcctacaggggcatggaccattcctgtctctttgccatcttgctcgtcatctgtgtgattcagtgacactcaggatttcctgctttcctgtgtccttgtcagctgctggaggctctgagaaaatgccctcttctgcaagcgtccactttccagaccctcagtaggaccactctcaaccatcttcgtgtccaggaaatgatctgtgatttagtttatcttatttatagttttctggtggtattgttgtggttttggtgtttggtgtgtgtattatagagtcagggtctcatgtagcccaggctggcctcttccagcattcacctacctcccaagtgttgggataacaagcgtgcaccagtgctcctgggttatgtggtgttggggattgaacccagagcttcatacattctagaaaagccctctgccaactaagctatatccccactctctcccctacagacaagctctcatgcagcccagactggctttgaactcctgaacctctcgccttcgcctcccaagtgctgggattatagagatatgcaccatcacatgcaatttgtgtttgtatgtgttgacataagttctcactgtagcccagactgatatctacaatcagcaaatcttcctgtttcagctttccccagtgcagggatcacagctgtgaaccaccacatcaccacagtttggggcttcgtttattttattttattttactttattttattttattttattttattttgtggttgctggggatcaaacccagggcccacacacactaggtaagcactccctcactgagctccatccccaaccctctctggtctttcagtctataggggactctatcagtacctccctgagtgctaataatcaggccaaaggttcaggtcctcggacctgtggatataagttcctacacgcagcttctgcacattaaccgcccagtaaacaaatgtgaaacaaaggccggagcattgtttcaacaagatcaaaatacataaagcacaaaataagtccttttcagatttcactgttgggaaattcacattcaagtggcacaattgtcagacctagaaacaaaaatcttggcttattttttgtttcattctcttctttgaggtgcttgctttgtaacctgggctagcctggaactcactatgagcccaggctgtcctcacagtgataggacttggccactagtactctgctgttttcatccatttcacagtaactctgcatcgagctccctgccaacatcctgaggacgaatctcactaactactggtctgttaatctttagataatgagaaatcacatagactgaactaagcaacacagctttgacttctgggaaacactgtgtttcagaagtgtcctttacaccatgaaacctataaacctttaacattcctgtctctctctctctctctctgacttggagtttctgttctgtccccgtggcccacgcttccgattcagtgaacagaattgactgtgctgatgtaagagtgagcaggcctgcccaggcctgtgcaaactctgcagataggaaagggcaggtctccacaaggtggtgagtgtggccttgtggggatggggctctcaggcgctaccttgtgactgtgtgaagctgtgcagagacaaacattcaggccccttcggggacttcttagaattcttagacacatatacacatgcacacacacacacacacacacgcacacgcatacatgcacacacacaacaaacacataaacatctcaatacacaaacgctctctttttcctttcttcagtctctcctttttcatattctcttcccacccttccccccctcccacaactaatagaagcctgaaaaaggccctgcagaaatccagtggctcccaagcaggctggctttgttgcagtgctgaagaggcagggacaggcaagaaagcagacaaccagagcaggagttggctcagttcctaggggaaggcctggctggtaagactaggaatgctcttgtggtaggtggaaagtcgtgggattaatagatttatatacactgtagagagctaggattggtgagtttggggcaaggaaaaaggcttcttagagaactaagagaaaatagcaactacacaaaatgtactaaataccagggagttagtgcttgttgttgttgttgttgttgttgttgttgttgttgttcctaaaaacatatgttgctgaaagcccatcttggccttgaacctatagtcttcctgcctctgcctcccgaatgctggtattacaggcatgtgccacagtgcctggctaagttatcacttcttcagaaacaaaattcagacgcctagtaattaaaagccctgtagagctgtaggactccagcagaagtttcatgcatgtgggaggccactataggcggtatctgcctggactgacaaagccctaactgcaggtttactccagtgatggactgaggggtaacactgggagttatgactgtaactggatagataaagatgcagctcccaaaggcaaagcatgctgggagtggccctccctgacagctttgtggacaacacatgttcttccctccaaggagatgatggtcactgccatcctaagacagcgtgtctctggtggtagaaacagaacaccagtccactccactcatccagggcttgctcctactttttcacagttggttttttgctgctttgcaataaaatataaaagaaatacatagggaggctggagagatggctcagcaattaagagcactggctacacttgctgagaactggggttcaactcccagaatccataaggtggcttataaccatctgttaccccatttccatgggattcaatgcccttttctggcttctgcaggcaccaggcatgcatgttgtgcacagacatacatgcatgcaaattacacacgaagtaaaaaatgaattaaaaagaataaagaaatctataggcaaggcaaagaattgtggcctgaagtgggggctagggagatggatccttgggtcaagtgcctgccacataagcactaggacctgagctcagatccctagcacccacacaaaagctgggtgtggtagcacatctgtaacgctgacgctggctaggggtgggagtatggagccgggcaggcagactcctggagttcacaggtgagccagtctagctagtagtaagagacttgtctcaaaagataaggaagatgtagagggatgctgggagacatccagttaccaacctctggcctccatatgcatgtacaaacacatcacatgcatgcatacatgcacacatgcgcgcgcgcgcacacacacacacacagagaattttagcctagactggcaagtctaatccaaggcaatgtggaaacaaaccaaaggaaatagcttgttataaggataaaataaaacaggtgccatggttgcatactctctgatgtttgacgaggacactgttctgtttcacctttgtccagtgtctcctcatgtagctgcgttctagacctctgcgacattcgaggtggagtctcctaccttaccaccattgaagaaatatccctgagcatcagtcaacccctcacacttggtggaaaattagccaatgaagaaaattgatattgtcatttacttgtggccgtgattttaatgaagatcgctttatttatttatttatttatttatttatttatttattttttagggagaagaaaatgactttccagacagcaccaaagatcccctttcaggtaaagggttggccttgcatcagcagcagctgggcagatacattaaagctattcagtgaatatgtgtgttgtcaatgtgtgtgtcgtgattgtgttgtgtgtgtggcttcatagctatatgacaatcagtagttagcttttatccatgttgatgagagcatgtgtgtgtgtgtgtgtgtgtgtgtgtgtgtgtgtgtgtgtgtgtgtgtgtgtgtgttctcgtgcgcacacacatgtgcaagagagagagagagagaaacagggcgggcagggataccttaattttttaggtaactctcaccaagacctggagatctctgataaggctaatacagctgaccaggtctcctctctttgccttcccaagactgggaccacaggtatgtgctaccacatctgaccttttgatgtgggctctgggaggaactttgaatgcttgtgcttgcacatccaagcgctttactgagtgtgctgtctctccccctcaactgtaatcgtattgtttaaacaatagcacgtgcttacataaccaaagcctagagcttgctcagtgaccttcatctttgctatgttttctgggtagagtaggggactcaaacacctctgtggagcctggtatcaacacacgcacttggaaccccatctttttcatgaacagatcccaatctttatgagtgccagagaagttcgcctattgagcatgttctgatgttgaattccctgtcactttcatataatcccttctgaaaggcccaaggtacacagaagaggacaaggggtcgtgggagggaactgtttacaaacctgcatgcagaacagagtcactttccatcctaacttggcatggccaagtacacagccaagtatgtctccctccaagtctcccacccacccagggcagcactgggaaagggacccagggccttcatcaagtatcagagcagtgctctgccactgagcctcatcccttgtcctgaaagtttagagaggctcttctctgacctgagctcatcccctttgtctgtggaggccaccatccaccagagccctgcatccttcctgtgttgacagctatccctatgtcctgagacagtttccatctcagctgaacatctaaaatccccgagggaactgtgaaaaacccccatgccctgctgtcacgccagtgattaaaataggaccttggtggctggcccagatgtgaggaggattttttcccctaggagttggaggggatcagtgggttccatccctagtgaagttgaagaacaattgtttcttcttctttttttttttaagatttatttatttaatatatgtgagtacattgttgctgtattcagacacaccagaagagtgcatgggatcccattacagatggttgtgatccaccatgtggttgctgggagttgaactcaggacctctggaagagcaggcagtgctcttaaccactgagccatctctccagcccgaacaattgcttcttaagagccatggtatgctgtccactgtgtgctggctgggcagtagaaggaggctttgatgggtatccttaatcctaaaatcagtgtcattacctgtgttcacagagtgagctgggggcttagcatacccagtaaccatccaagccacaccccctttgcagaaggtgacctgcctcaccgcagggagccttctccatagcaaggctttctccccttgagctagcggtgaactggacatgcccctgaaggtctgaccctcttatctgcacccaagcgctggggttgacaggtgtgcacaagttttatgcagtgctaggagtttgcacccaggccttggtagatgctgtgtgagcactctacccactgagccacatctgcatccccttgcttagaagtgaccgataggacaagagttattaaggcatctaagtggatttttatagagggccggctgcttctcaaccaactcctttcttgatagatctagaatgggcccacggtttagtgtttggagaccaagtctgtgtgttcccatcaccgtgtactttctgtggatggcggctgccttccccttccctcactgggaatcaatcctccttgccatttctgaagtgcacttgggagagctgaccttcttctctggagaaggagagtcctcgtgtatctacctatttgtcaaatgcacctttgatttcttttctaaaatatcatttatttttaattacgtgtctgcgtgtggcagtgtggagctatgtgcatgtgaatgagagtgtcccaggggacaggagagggcatgagattccccggagctagagttacaggtgtctgtgaatactcttaaccgctgagccaactcaccagcccctacatttttaatatccagagagaatttggcattggaggaagggctagcttatggtcattacagtaactgtcatttaccaaagccttctgtatgcccaggacttatcacttagaggtactgggtcttgatctactcttccctcgtgtctgatgtgtgctttgttttcaagagaacagatgctctctagggaaagatatctttctctaaaaagatatctcaaagtttaccctttgtggtataatattgcatgaaatatgagaaatatttaaggtatggaaaggggtaaatatttcatagaaagtaaccccagtagttaaattttatgattttcttttcaattccttacagggtctttctatctagtcttagctgtcctgaaactccctatgtagaccaggctagcctagaactcacagagacttgtctttgtctctaagtgctgggactaaaggtgtgtgccaccatggcaggcttagcttgtgattttcataggccgtttgaaatcttctcagtaagcaactcatgtggatctcactattgcttttccaccttattcagaggcaagtctttcatccaaactctaacctttccagccaagcttgctctgtggatcctgcctctaccttctgaggctggagttacagttgggctatcacagagcatttgcagggctctggtggtctgaacttcagccctcatacttattcagcaagcgctttcgccactgtatctaatgtctactgtgcatcctacgcccctacattatttatttttaagacaagtcatgctttgtagccctcactgccttggtactcaggctagcagtggcaaatctttaccacctgagacattgccctagcctgcctcaattcaaattcctcactcagtgccaccatcagtgacatcatgtgtagtaacatgtcatcttacagtaaaggtcacgtccccacaacttccgaagcctgtgacctttaaccccgaattcagactccagagacagtgttgtataattgctgctgctcagtggctgtgcctgaggtgtggcaccaccatgggctttagtgagtgacttcctgagacctcttctcctcaaacctcatctcctaatcacgcttctaccttctcctaataaacaatgctgagaggactgtagagaggaggctgtcctcctggggtaggaaccagttttttgggtatggctcaggctcctcagcctgcctccagctctctgtataccctgagggctgtaggccacacttcagacagagcctgtgtgagcaaagaaaacagatagagcagaggaacgataaggaggctgtaaattctgaatggaagcgttctgccaacatgctttcaaatatgcgcatgcgcacaggcagggagcccagtgctccctctcttccagcacttctgaggggttgggcagtcacaatgatgttgtcgcatgctaagttttgtgtcaaaagctgtcagggaggccagtgaaatggcttagtagggaaggtgctcccacatccacatggtagacaagagaaatttgactcctgcagcagtctgttctctaaccttcacacatgcaccaggacacacacccacccaccaatagcaacaataaatgtaactttttaaaaggctatcaggagcaagaggtggatctatgcacaagcacgagctggtcgtggaaccctccgtctggccaatgggcccgcaaatgcaggctcaagcagagcaaccacggtgaagaggcaagatggaactgccagctcttgctactgctcccagctcaacaacctttcttatcctgtaaagcaaatgtcctcaacctgcgggttgtgacccacctatgggtcaaatgaccccttcacaggggtcacatatcagatatttacatgacaatagcaaaattatagtttataatgtatcgacagaaataattgcatgactgtggtcaccgcagcgtgaggaactatactaaggggtggcagcattaggaaggtcgagagcccactgtcgtaaagaggaacacaccgggttgagagagatggctcggttagcaaattgcttgccttgcagaacgactctgaagccaagtggtcatgctcatgccagtgaccccagtgctaggggggtgaggtccctggggcttgctaccctactaagtaagctccaggccagggagagatactgtcttagacaaataaaaaaacaaaaacaggctcagtggataaaagtaaaagccgggtacctcagaggcaagggatacccgtaacctgaccagtggaatccggattcaggtagatccctgaggtttcctgactgtccactttagccggatctgtcgactctaagccagtgaaagaccctgccttcgaagagaggtggtcgggagggagggtgacacccaaggttgttctctggcctccacacataagtgtacagttacatacacagagaagaagaatatcgggtgaacaatgaggaatgactgttctgcactattccaaggaaggaatcgtggaatcgtgtgtgtgtgtgtgtgtgtgtgtgtgtgtgtgtgtgtgacacttagatgatgtcaccaaaatggtaggaaaataaaaggagtattgctcgtgcgtgcgcgcgtgcgggaggtgcgcatggcccctgggtaacctgtgacctctctgtcatcctgcaggtgtcagcagaaaccagccctgtaaggacgggaagggcagctgctcttgcccttcctgctccccccgggcccccaccatcagcgacttgctcaacgatcaggacttgctagatacgatcaggataaagctggatccatgtcacccaaccgtgaagaactggaggaattttgccagcaaatggggcatgccctatgatgaactgtgcttcctggaacagaggccccagagccccacgctggagttcttattccgaaacagccagaggactgtgggccaactgatggagctctgccggctgtaccacagggccgatgtggagaagatcctgcgcaggtgggtggatgaggagtggccccaccggggacactccgacagctccatgcacttctagaatcccctctcctctggcattggccctactgctcgttggaccagcatggctcctgcggagagcgtacctgctcctaaggttttcaggataaggtgtgggcagtggtcgtccccgaagctggcagcttttggaaagacacgttgtttggatggcaggtatccgtttccttttgcacatttgttttaatttaatatttgagcctgggattggggaagaatatttggtaggtcacacagggccaaagcctgtggacagagacatgccaacatggaaagaaaatgacaccctctttaaatactgccaaagattgcagcgggatcccaaaatatcaatgtctttggacatgtccgcatacagaatcccatacagaatctctgcagtcctggccagaggatggcagggagaagtcatcccggccggttcactgtcactgtttctgttgaaaaaggctcaggagagcaaaaggatactactgtataatgtggcccaggtatatgggctcttttttttttaatcaaatacttttgtaatctataggctatcaatactgtcattgaatttagcatttttaaaagaaatacaaaatatatggtttgtaggagaagagagtgtcttgggagtggcattgacaaagaatagtgctcagttcggcctttgggaagctagggaggtagctcagtgattacggtgccctccacataaagcatgggaccagagtctgggtccccagaacccacataagtgaggggaggctgtggtagcccacctgtgatcccagcactcagaaggcagaggtggcggcgatcccagagcaagctggctagctacacctggcacatggatgaactctgggttcaactgagactctttctccatgaacaatgtgcagagtgattgaggaaaactttcaacatcaactttggaagtctatatgcacacacatgtacatgcacatctgcatacatgtgcaacaacaacaacaacaaacacacacgcgcacatcttttaaaatgccctttgggaaggctgaggacatgggccaatgagcgcacacataatagccagacgtggcagcatgtgcctgtaactccagtactggggagcaaggtccaggaactccctggccagccagatagccaaattggcaaggtttttgttcagggagagaccctgtctcaaaaaaggaaagtgaagaataactaaggaagatacctgagggacaacctttgacctaaacacacacacacacatatacttgcttgttatgcatgcctttaaaaaaaaaaaaaaaaagcagggccaggactctaccactgagcgagctacacctgcacctctgttattaatgggttttatttttatgagaacccacaaaaaaaaaaaaaaagctgggcatggtggtttatacttttaactctggctaggagacaggtggatccctggggctcctctgccagccagcctagcctatgtgctgagctacaagctgatgagagatcctgtctcaaaaaaccaaggagcaacatcagagttgttctctggcttccccatgcacatgtgcacgcaagctcgcaggcccatgtacatgtgcaccaattaaagtaaacagaaaggaagaatgtatactggctgtatagcacagagatagtaagaggaacgcaaaagaaggtgattttctaaaccactttttttttctcataacagttagatttccccttaggcggttggtaggtaaagccagcttcccacacagcgtgaactccaatcaacaacgtctacagtgagacttgcccatcagttctggttcactgttaatcacaccagcgtccactttattgccagatatatttaaagtgggagctgatgattaaatgcagacgtcctagtgttttttagatgtatttgtatgaatgttttccctgtgtgcatggtacctgcagtggttgaaaggcgtcggatcccctagaactggagttgcaaatgtctgtccatcaatctccatgtgggtgctgggaacacatctgcaagagcagctagtgcacccaacggcagagcccgtctccctagcccctagacgcagatatttttataagtagcttctcaggaaagtcagatgttgtgagcatcatgagcgtgatctaggcttctagcagaacctgtgggcatgttgtggggagctctaaacattgcgcagatgtgattggttgcctactttctcattaagctctccatggcgtgatctggctggttttcacagggtctcctagcccaaggtgctctcactctcattctgtagcagaggatggcccagaatttccgatcgcctgcttctgccttccaagtgctgggccaccacacgtggtttagctctcacttcttagagcagaggcgactgtagggaaacgagaggggctttggaaatcactttgcaggaaggaactcagaaggtgaggctcagagatagaggaatgatggagcattgggaaatgccagccctagctttccaatgtatgccagaacttgagttccgtacattacaaacatccagagtgagtactgctcatgactggcctggggtagccaatcctttcacccatcgctttcacaggaagtgtttcacaggaagtaagtgtttcacaggaagtgtttcacaggaagtgttgccagtacttcagcctctacgcaactggtcaggatgcagctccagaacacagctgtgcttgtaagtgttcactgaattcaccttccgggcattgggtcaaaactgtgaagcggggctagggggatggctcagcacttaagaacacttgctgctcttgagctaagtttcaagtacccacatggggtgagtcatgactagctcctggggatccgacaccctcttctagtctccaagggcactcgtacatacatggcatacacttacacacacacacacacacacacgcaaatccctaaaagaatgtcaagcttggcctgagaatgcagctcagttgttagagtccttgcctagtgagccaaagtttggtccccagcattgcataaaccactgtgatgatacacgtcccacttccagcactcgggggtagaagtagaggatcagaaattcaaagttatccttagctacaacgtgagtttgaggccagccttccatatatgagaccctgcttcaaaaagaaaacagaatgtcatgcaagccatgtgtgctgctccgtgactgtcaccccagcatttaccttgtgagcgtttctaattataataggatcgtgaaatcagcagagaagtactgaaagatgtccggaaattaactctgactataagtgtaagatgacttggatctgtgttgtacaaagaaagccaaggattattctcagctacagtacaaaccagcttattgaaaggtagcttatagccagtgggttctactgaaacatagatagataccctggaacttcacagaggtgaggccaggggggaggaggtcactttatgaccaactgattaattattgaaagcttagtcatcactttttaaatattcgatcatttttaatcacatgtctctgtgtgaggtgtgcacgtgagtataggtgtttgtagagacctgaggtgtcagattcccccagagacggagttgctagacatgggtgttgggaactgaactcatgtcctctataagagtagtgtgagatcttacctgatgagccatttctccaccccatcatcattaacccttaagagctttctgtcctggacacccatattaaagtgaactgctcgggaatgaggttggtttcctattaaaatgttgaaatctgcttagctatgtttcccaaagtatttttctttaagagaaatttccatctgtaaaggtctatgatgaggccatatataggatgcattttatttgggtgcagtagtggagagtcaaacgaaagggagggactcaaagtcacactggacagccgtatacacagggacagatgacacactcctggggacccataccagagtgtcgggcaaaaacacggcatgcaatattagcacagtgaggttttttaattagttagggcttgaagctgtgctaggatgtccaacctgtgcctcttaaaacaaacaaacaaacaaacaaacacctctgtacaaagtagccacctacttgtgtagcactttgtaataatacagaaaatctggccctcccgaacagtaatttatgtgatgctgccccctgctggaggatacagagtctggcttggttaggcgccttccaaggaggccccactaagacagaaagagaaagggtatgttttctctgtgacttggcagacgaaggcactatacagtgatggaggctcatgtctccaggatgtgcccagcacagtggcctggtactcatctgtcagcactgatgcacttgcctcctcgggtctcttgggtctcttcctctcccagttaagcacccaaggatgctgggatgcagcagtctcatttacactacaaaaagacgtgcttctaaagacaggattaacaacagaggccaaacagatttttctcttctggcctctcctatgtaaggcagttaagcagatctcatttggttttgagcaaagactttcccccaggtcttttttttttttttttttttaatcaaccctattgtccctgctttataatttccctcccatttgaagccgtgatattgctgtctacaccacttgctcagagcgagctgtatgcatatctcaaatcgtcttcctcccccggccaacagtattcccctctctgagctggcagcaaacatctgcttcgtgttgccacgtgtacacacagaaacaacaatgccatcgatgtagcaatgccaaaccactctgccccgggtgctacaaaaccaaaggcagagagaggcacacacctccggaagcacactgagagatatttgcagttttgtcgcctgcctgggactcagaccccaccctgggactcctgggcccttggttatagatgcacaaggaaggggggaatcttagctttgctgtgtttagagagaatcaaagccaagatgctgggccgagtgctggggctattgaagtctcagcatcagtggatggagcaccagtgggttcccaagacctagacttgaaggaccttggtggaacagggtgtgcttccttccggaggctgtggagggctatggctctgggagggaatccctgggtggtcacgtggactgaagaccctggagtggtcagtgatacaactggaaatgaaatgatggaactgcccagatctcttggacatggaagaggatgttgcattttgtgtgaccgtccagtctgtcctctgcagcatccctctgggaacttacgcagacatttcagcctgcgaaggcaaagcttccgaaagccctgcttcctcggaatgccatccgtacaccttggtgctatccttttgaaactgtctacattttcacctcctctgtgattctgtttttggaaagattttataactgtaataatgggtgctacaacattaaagactgatgtcaactgcagttctagtgggtgcctcattttcttgaaatgtatatgcatttctgggaaggggcgttttgcatgtacgcgaatgcgtgtagaggcaggaggacacccttggatgtcaggcacacaaacataccattcacagattttgagacaaggtctgccattggcctagaactcatgaattacaccaggctagctggccatgagacccaagaggtcttcctatgtctggctcctcagtgtgaaaataacaagtgttatttgctcagcattttcacataggttgtgtgtcctcatgcttgaataaaaggcactttcttgactgggccatcccctaatacctactttgtatggactctagcatggtcatcagctcataggtcctgtagcccatcatctatttctgttacttgagtactctgtggttttctgaaatgagtcccagatgctgaagatgctgagacaaacagcccaaccattcactccaggagctgtcgacagacagtcactgcaggtaagggctgataagactagggaatgtgggcaaaggtggtccaggaataggcccaagatgcgctgagcaggaggaaaagcgagcagttagccttccgagagggtctccagtgtactgtgtctgtatgtgaagggtcatttcactattcctacctgcttctcccgacccagtccatcctctaggtatctgtgggttgccctctctgacaggaacacttcagactcacctgttccatgactaatcctcgcagcttcgtgacctgctggagttttctgtgtcaatcatctaccagcagcttcagcatccttaagactcttcttcctggtctatttccctctttgggctgtttttgttatcactgtctctgtgtatggggtgtgtgtgtgtgtggtacatacaagaacacagatatacatgagagtacatagtatgggggtatacatgcctgtggaagttactggccaatctccagttctccagcatctcctctggtgccacccaccttgattttttttgagacaggatctctctctggcttggttctcaggttttggactgaggtgactggctagcaagccacacacacacacacacacacacacacacacggatgcccatgtttgcctagagtcactaggatccccacatctctccacgcagtgtatctagctgctctgtgttggaaactgcccctttcaattcacttcgctccacatctcatctttcacgcacgcgactgctcgagccacccagaatcaaaaccaaacaagttgttacctgcttgaattcctcgttctgccatctcatccaaacataaccatctctgtcagtttaaacgaggagactctttgtgactctaccttgaaattatcatggcatttgaaaatagcattagcaataaagtcttatcatggctacttaattgccgttcaaaaactcaatataaattgaaacttaaaaacactcaaggaaaaaaaatgcagtctgagctaaacatggccagaagtctgttcaaatccatgatgatccacctctggttctactcctgaaaacagacagttcttttacaccacacttgacagaaaacacataaccgacattgttttacctgttcctggcaaagtctctgaactgggaacaagtgggtaatcaaggagatggtgagttaatgcttagataccagcttgggaagatttcagaggagatggggccagattccttcacgcaccattcaagcaactgtcaactctagagagccaattccttgttgctcccaaggagctagtccagggagatcccggcccagggctgccccaacacacctccccagaattatcaagtcacagcttgttttcctaggcaggtttcacctgttgcaaccagtaaagagacactttgaaaaatgcatgccagtatgtttgcactagaaagatttttaagaaatactaacttagggcagtgaaatggctcagtgagtgaaggtacttaccaccaggcaggataaactgagttcaagccccaggactcagttggtgagaggagagagtcaattcccacaagttgttctctgagctccacataggtactgtggcatgcaggtgtgaaatacataagcattaaaagtcattgaagtcattaaaaaaatactaactctatgctgaatgtcttaaaatgtcagtaacttcataaaaagactcctcagaactgtacctccaatgacatgtgtgtgtgtgagactgtgtgcacacatacgagcatgcctgcatgcatgcaggtacacagggtaaagatgattaatcctggaggaccctccttcccccagcaactctttctctagaaggctctgcctcccaaaggctccacaatctctccaaagattgccactacctggagaccaagagtcctaacacatcatcttttaggggacatgtcacattcaaaacacagcaaacttacacttttcacctatgatcttgattcagctaatgctcctccatttcaagttcactcacacacacacacacacacacacacacacaccctgcccagaggcacacatatttaaagcttgggggaggggagggagaaggagggagggagggagggagagagagagagagagagagagagagagagagagagagagagagagcttttaaagatgcatgactttcccactgatcttggctttcatgtgggtgactcaggccctcaagcttggagtgacaggcactttaccaaaggagccatctcctcagcccattaaggagtctagttctagatgctggagccagccagccgtgtgcagtaatcccctctctcaaaccttctctcatcctgaaagaactcacaggagagatgagtctggatccgtcaatagacacagtcaatagatcctgactcatccggccattactaggaactgctaagattgctacccataccaactgccggaagtgccaagagtcagcttaggctagaactttaccctaaatcccactccaacaaatggccctgttttcagaaacagtgcagcttctgctaccttcaccattgcctcaacttccagaaggtccacagtcagtggctaaggaattcctacaggaggggcaactcttgggatctacccttatgatacacagtttgatggggcaagagcccaaatgcagcctctgattctaggtggtggtgataaatacacgcagttctgccttaaatgtctagaaagttaggtgtgcgtttgataaagctggcttgggttttcaataaaagataaggaggaatatgaagatggggaggggggagggattgagggagggagggggcagggcgannnnnnnnnnnnnnnnnnnnggagaataaataaagccagtgaaatggctcagcaggtgaaagtcctagcaatctgtgtttgatcaatggaaccccagtaaaggtgggggagagaacaactgcacaaacctttcctgaagggctacatgggcaccttggcaggcgtgtacacacacacaccatacacagagatagtaataaaaaacaaccaaccttttaaaacactgacccttgggctaaatcattcggatgattgtcattctttgcaaggttcactgttagctgggtggagtagctcacagatataaagccagcacttaggagatacttagtgagttccaggctagccttggctacagaatgaaactctgtgtcaaacaaacaaaaaagacaatcatttccctagaagccccacctccggacacacagccatgtctgacagtttagatcctaacctgacctgggccaccagcttctttccatagcattagtcacagctttctgatgcattttagtctacagattaagaaaatgaagatatgctgatcacatgaggacacagatgatttgctgccaagtcatgagattcaacttcctctctgctactgttgcaggaggccatgcctccaccatcagactaacacagactagtctggtgattatccatttagtcaaaggtttcttctgttgtacagactccattctaagtaataactaggcaatcataaaaatatatgtctgagagaagatcgtagaagaaacactgcatgaaacgggtgtttgtatcaactgaagacagggaaaactataggtaagcttcagagaaaacaaattcatatatcctctgcaataagaggcttgcagataatgcttgcccatcgagcacagctagttttcgcagatgtaactctgtggaaattagaggaagatggacctcaagccaaccccagcccagggaagcagcacgggaaaggtgtgtgctgcacacgctgggttctggctgccatgccctccttcagctagctgtgttcctgggtcatggggacacaggtaacccgccaggtttaaaaacaaaacaaaacagaaaattaaacagagctgctttgctggcgtgagcctatagtttcagctactctggaagctgaggcaggaggatcacaaattcaaggctagcctgggctacagattaaattcaaagccagtctgtacaacttattgagagtgtctcaaaatagtttataaaaatgaaaacaaggggctggagagatggctcagcagttaagagcactgactgctcttccagaggtcctgagttcaaatcccagcaaccacatgtggcttacaaccatctgtaatgatgagttcaaatcccagcaaccacatgtggcttacaaccatctgtaatgagatccgatgccctcttctggcatgtttgaagccagctctagtgtactcatgtacataaaataaataaatcttttttaaaaatgaaatcaagtccggggttgctaatgatatagttctgtggtggagtgctcgcctagtgtaagcaaggtaatggtataaatggtnnnnnnnnnnnnnnnnnnnnnnnnnnnnnnnnnnnnnnnnnnnnnnnnnnnnnnnnnnnnnnnnnnnnnnnnnnnnnnnnnnnnnnnnnnnnnnnnnnnnnnnnnnnnnnnnnnnnnnnnnnnnnnnnnnnnnnnnnnnnntggggtggggatgggacagggtggggagcagtttcactcatccccattacttcagacttacacagattcattattcccaccttccagctcttggttagaaactttgccatctcctccttacactccttagacttccttcctggacctctgacttttgattcccaaaatgtggttccagatcctgctcacatcgttggctttgatcccctctcagctccagtgtgtggtttccaagtaacagccttttaagtctctctctgtctcagcatccttcctgccaccatagcctggacactttacttatttttatttatcttttatttttatatatttgtatgcatgtgtcttagttagacaccatgacgaaggcaactcttataaaggacagcatttaattggggctggcttccaggttcagaggttcagtccattatcatcaaggcaggagcttggcaggcatggtgcaggaggggctgagagttctgcatcttgttccgaaggcagacaggagaagagtggcttccaggcaactaggatgagggtcttatagcccacacccacagtgacacacttcctctgacaaggccacacctactccaacaaggctacacctcctaatagtgccattccctgggacaaccatattcaaaccaccacagcatgttgtttctccatgtgagtacaggaccctgtggagcagaagagggggtcaaaatcctagaaatggagttacagacagttgtgagctgccatgtgggtgctgggaattgaact

SEQ ID NO: 3193 - DNA, 2328 bp, Mus musculus
aggagccgggaaagccacccgcgcgtgcggcagccaggggaaggctagctgaaaggctctcccagttgcgatcgcgtgggacctccgtggtaagaccagggttctacgccctaggtaccagcagggcaagtgctccgggggcccctcggtgtcctctcgtgcccaaccgcaacccacggaatcctctccagagttctggagagactcgcgccgggaaggggctttgctaattgcaggaagtgagcacgaggaagaagtggcagagatcaagaagaggaaagggaggaggaggagcagcagcagcagcagggcagagcgcagacagagtcgcgcattaccacgcaagaggttgggtccctgcgatcctgctgttctcaggggtcctagagactgtccacccctgctcggacactcatctgtcctctcctggtcttcatggcttctccggacgaccctctgcgctcagatcacatggcaaaggagccagtggaggacacggaccccagcactttatcctttgccatgtcagacaagtatcccattcaagacaccggcctccctaaaggtgtcagcagaaaccagccctgtaaggacgggaagggcagctgctcttgcccttcctgctccccccgggcccccaccatcagcgacttgctcaacgatcaggacttgctagatacgatcaggataaagctggatccatgtcacccaaccgtgaagaactggaggaattttgccagcaaatggggcatgccctatgatgaactgtgcttcctggaacagaggccccagagccccacgctggagttcttattccgaaacagccagaggactgtgggccaactgatggagctctgccggctgtaccacagggccgatgtggagaagatcctgcgcaggtgggtggatgaggagtggccccaccggggacactccgacagctccatgcacttctagaatcccctctcctctggcattggccctactgctcgttggaccagcatggctcctgcggagagcgtacctgctcctaaggttttcaggataaggtgtgggcagtggtcgtccccgaagctggcagcttttggaaagacacgttgtttggatggcaggtatccgtttccttttgcacatttgttttaatttaatatttgagcctgggattggggaagaatatttggtaggtcacacagggccaaagcctgtggacagagacatgccaacatggaaagaaaatgacaccctctttaaatactgccaaagattgcagcgggatcccaaaatatcaatgtctttggacatgtccgcatacagaatcccatacagaatctctgcagtcctggccagaggatggcagggagaagtcatcccggccggttcactgtcactgtttctgttgaaaaaggctcaggagagcaaaaggatactactgtataatgtggcccaggtatatgggctcttttttttttaatcaaatacttttgtaatctataggctatcaatactgtcattgaatttagcatttttaaaagaaatacaaaatatatggtttgtaggagaagagagtgtcttgggagtggcattgacaaagaatagtgctcagttcggcctttgggaagctagggaggtagctcagtgattacggtgccctccacataaagcatgggaccagagtctgggtccccagaacccacataagtgaggggaggctgtggtagcccacctgtgatcccagcactcagaaggcagaggtggcggcgatcccagagcaagctggctagctacacctggcacatggatgaactctgggttcaactgagactctttctccatgaacaatgtgcagagtgattgaggaaaactttcaacatcaactttggaagtctatatgcacacacatgtacatgcacatctgcatacatgtgcaacaacaacaacaacaaacacacacgcgcacatcttttaaaatgccctttgggaaggctgaggacatgggccaatgagcgcacacataatagccagacgtggcagcatgtgcctgtaactccagtactggggagcaaggtccaggaactccctggccagccagatagccaaattggcaaggtttttgttcagggagagaccctgtctcaaaaaaggaaagtgaagaataactaaggaagatacctgagggacaacctttgacctaaacacacacacacacatatacttgcttgttatgcatgcctttaaaaaaaaaaaaaaaaagcagggccaggactctaccactgagcgagctacacctgcacctctgttattaatgggttttatttttatgagaaccca

SEQ ID NO: 3194 - protein, 205 aa, Mus musculus
KALPVAIAWDLRGKTRVLRPRYQQGKCSGGPSVSSRAQPQPTESSPEFWRDSRREGALLIAGSEHEEEVAEIKKRKGRRRSSSSSRAERRQSRALPRKRLGPCDPAVLRGPRDCPPLLGHSSVLSWSSWLLRTTLCAQITWQRSQWRTRTPALYPLPCQTSIPFKTPASLKVSAETSPVRTGRAAALPAPPGPPPSATCSTIRTC

SEQ ID NO: 3195 - DNA, 115378 bp, Homo sapiens
ccgagtagttgggattacaggggcatgccaccacacccagctaatttttatatttttagtagagatgggtttttgccatgtcggccaggctggtctcaaactcctgacctcaagctatctgcccatcttggcctcccaaagtgctgggattacaggcgtgagccaccacgcccagcccagcccttaacaaattaataatagttattttaaattcccattctgataattccaacattcctgccatatatatatgagtctgattctgatgcttgcccggtctcttcaaactgtatttttttggctgagcgtggtggctcacgcctgtaatcccagcactttgggaggccgaggtgggcagatcataaggtcaagaaatcgagaccatcctggccaacatggtgaaaccccgtctctactaaaaatacaaaaattagctgggcatggtggcgcatgtctgtagtcccagctactcgggaggctgaggcaggagaatcgcttgaacccgggaggcagaggttgcagtgagccaagatcgtgccactgcactccagcctcacgacagagtgagactccattaaaaaaaaaacaaaaacagaaaacaaaaagcaaactgtaactttttgccttttagtatgtcttataattttttcttaacctgctggacatgatatactgggtaaaaggaactgatattcataggtcttcagcaatgtgctgttaaggtgtcgggggagagaagctttccctagtgctatggttacatctcagtcttttgtcagcctatgactctgaactgtgaacttcacaagtgtttctcagtcccacccacccccctttaggtgggatctgatggttagagtgggttggagttgggtattttccttcctccaggccagttaatttctcataaaatagtttcttctaagatcaggccttgttaagaagaatagaatgctctggtatatttcaaaatggttctttcccctccctcttctacaaacacaaggggatttttctccaggagtcactgtgtgaacctgggggaacttctaaggtgaatacaaaagtgtggtgagggagcctgaagttttcattgctcagagaattgctagcaactcagcaattcttcagttacagttcaggttttcctaccccagagctggttcctggggaggtttctactcccatcagttgtgggtctctatatccacctgtctgtgtctccaattctgggggtaggaatttgccctatgaccttacttctctgacaaatgtaagaagagtgttagatttttcagtgtgtggagctttgtacttgttaggacagagtgatgacttccaagctccctgcgtgctggccattataaagttttaagtatttgagagcaaaataactattttattgttgaattgatatattttgcaatcttcattaatgcagcatgattcaaccactctacaacttcaaccacctactgaagttttagatacactttttccttatttatctctgaagtatttatacttcagctaaaatgatcatcttgtgtacttaaaattcttcttttttggattattttctttttatattcaaaatttagatccataatcctcaatcccaaactctattttttaaaaaagactacagtgtttgtaattgattagatcactagatgtggagaggggatgaggagagagggataaaaattattctttccagagctacaagtctctgactgattgaagtaaaaaaaaaatctgaggaaaactcagcattattggaagttgcccgtttaaacaactaaagtcagtcgggcgcggtggctcacacctgtaatcccagcactttgagaggccaaggcgggaggatcacctgaggtcaggagttcgagaccagcctggccaacatggtgaaaccctgtctctactaaaaatacaaaaatcagctgggtgtgctggcgcatgtctgtaatcccagctacttgggagactgaggcaggagaatcgcttgaacctgggaggcggaggttgcagtgagcccagatcatgccactgcactccagcctggctgccagagcgagactccatctcaaaaataaataaataaataaacaactaaagtcacaatccctgccttctcaagaaaacagatacccttgaaactgagaaagcttctattgaaataccggtgataggcagttctaaaattcagggtcagggccaggtgcaatggctcacgcttgtaatcccagcactttgggaggccgaggcgggcagatcacctcaggtcaggagttcgacaccagcctggccaacacggcgaaacaccatctctactaaaaatacaaaaattacccagatgtggtggcgggcacctgtaatcccagctacttgggaggctgaggcaggagaatcacttgaaccccggggggtggaggctgcagggagccaagatggtgccactgcactccagcctgggcgacagagtgagactccatctcaaaaaaacaataagtaaaattaaaaaattaaaaattgaatgcaaattcttaatgatcacaagagaaacgtaaattaatttgttaacctatgataaattatattccaaatacaattgaactaaatttatctctgtgctaaaggtaccaggtataacttgcttattttaagtaggcgtttctgccactaaaattgctgtgttacagctattaataacacaacagcagtgctggtttgaggttgctgatgtgcaggtcctctgagctgctgtttgcctttggtgcccgtacctgcctctcagtgtacttccatttccttgttgctttcattatttccttccttcataacgctcccatgccttctagagaaaacctgattggataaaacttaatagcataagactatttgcgtcttgaaaaggattaaaatagtgtgacacaaaggcataaagtgctaaaggtgtaagttgagataggaaaaagtctgaagtcacttcacatatgctaaccacaactctgtaaaatggaggaaaaatccattttactttcattttttttaaaggaagcaagtgtaaattaatattacttttgtttttatttgaacaattcatagtctggaaaataagaagactgaagggaaattttttaggtgactaaatgtttggaacagatgactgtgtgaaacatggtttgttgggggacagggaaggtcaagacttattttgctaagcaggtgcctttgtaaaaaatcatttctaaatttgctattaaaattttttaattacataaaaatacataaataagttatttattttaaatgaaagaacattacagacaaagctaaagtcccctttaagcattactttctcccaaccctagtcctttcctaattgcccagaaatagccattattagctattgttatgagcttggcatgtatctgtttgtttgttgtagaaatggggtttagctatgttgcctaggcttaatgcagtggctattcacaggtgccatcatagtgcactgcagccttgaactcctggcctcaagtgatcttctcgactcagcctccccagtatctgggaccacaggtttgtgccatcagtgcctggctatttatttaaagtagctttattggggtataattgccatagaatcaactgcacatatgtcaagtgcacaacttgatcagttttgacatacatataggcccatgaaactatcatcatgagcaaaagaatgaacatgtccgttagcccccaaagtttactcatctgcctttgtaatccatccttcccgccccaccctcaatcctgggcacccattaatcagctttctgttattataaattagtttgtgttgcaatagatttattatcagtggagtcatacaatacgcatgcttttgtttttttctggcctctttcactcagcataactattttgagattcatttgtgttgttatgtgtatcaatagtttgttccttttattggtaagtagtattccattctaaagatacaccattcatttttatttttattttattttattttttatttttatttacttttttattattatcatactttaagttctagggtacatgtgcacaacgtgcaggtttgttacatataagcttgtgctattttagtgtttactttagcgtttatcatatacatctttaacatgtcagagtgtatttttaagtgatattacaacaattcatgcataaaaatccttagcttccatatctcccttctaggcttttgaacaattgttttcattagttttatctctacatatatcataagccctaaatacattgttactattttgatttaaaatatattttttaagctgggcatggtgggtcatacctgtaatcccagacatatttttctgtcaattctttaaaaaaatagctccactgcctcctgccttacatggtttctgatgaaaaatctgctgtcatccttgtttttatgcctctgtaatatgtctttttttttttcttcctgtggttgctttttttttttttttttttttttttcagagttggatgggatcttatgttgctcaggctggcctgaaactcttgggctcaagccatcctacagtcacagcctccagagtaactgggactacaggcacatgccaccatacctggcttagtctgttaaaattttatcttatccatggctttgagcaatatgattatgttgggttttggtgatttttttttcatatgtcttgtgcttggtgttcattgagcttctggtctgtgagtttaaggttttcctcaaatttaaaaaatttttggccattatttcttcaaacatttttgtccttcctctttacatttctgggattccaattacatgtatattaagagatttgaagttactcctagcccttttcattttctaaagttacttttcccttcaatttctatgtctccaagtcactaatattttcttctgcaatatcttatctgccattaattccatccagagtatctttactctcaggtattatagttttaatttctaaaagttgtagtttggacctttttatgttttgtgtgtctctacttagcttgttgaacccatggactacagttacaataaaagttttaatgtccttcttactaactgtatcatctgtgtccattctgggtctgtttcaattgaccagtttttctccttattgtaagctatgtttttctgcttcctgcaagtctggtaatcattgtattccagatgttatgaattcacttcattggatactggatatttttgtattcctatacctcctctttagctttgtccttgagcagttaagttggttggaaagaatttgaaacttccaggtctcacttttaaggtttgttaggtggaactggggcagggtgtgctcagtctaggactaattattctccactattcaggcaagacccttttgtgtactctaccaaatgctcatgaattataaggttgttttccagtctggttggcacgaacaggcactattactagccctgagtgagcaccaggcacggttccctctaaagttcccacatggttctttccccagccttggataatttccaggatgcatgcgctgatcaataagtgttctgctgggtcctcaagggggacattctatagatctcttaggatctctctgggaagtctttaccctacagtattctgtcctgagacttctagatgttttgatttcctcagactctcagttctagctcctcaaaccagggagtccagcagtctctgtctgagtgtcctttctctgcgctgcaacttagaaatctctcaaggaaggccgggcgcagtggctcacacctgtaatttcagcactttaggaggccaagatggacatatcacctgaggtcaggagtttgagaccagcctggccaacatagagaaaccctgtctccactaaaaatataaaaattagccaggcatggtggtgcatgcctgtagtcccagctactcgagaggctgaggcgagagaatcacttgaacctaggaggtggaggttgcagtgagccaaaattacaccactgcactacagcctgggcaagactccgtctcaaaaaaaaaaaaaaaaaatctctcaaggcagtaagctgagtgcaatcataggaatccccttgtttgtattccagctcccagagagcaccatccttcttcacctggtgtgctgtcttaaaacctgttgttttatatattttgtctgggttttttgttgtattgtttcaggcagaagggaaaatcttgttcctgttactctatcttggttgcaagacaaagttgacatgtatccatttacaaaggaattacatgtagttatagaaaatatacagactggattttttttctacctctgatattaatctgcaacttatttggtcatttaaaaatgttttggctgagaatagtggctcatacctgtaatcccagaactctgggaggctgaggtgggagggtcatttggggtcaaaagctggagaccagcctgggcaacgtagtgataccatatctgtacaaaaagtttaagaactagccaggcagtggcacatgtttgtggtcccagctactcaggaggctgagatgggaggatcacttgagccccggtaggtcgaggctgcagtgatctttgattgtgccactgcactctagcctgggtgacagagtaacaccttgtctcaaaaaaataaaataaaataaaataatatttttgagtttatatcgtgtaacttctgtaaaatattctattacatgaatgtgttgtatcatatttacccataccccattgatgaatgcttaggttatttccaatctttgttattacaaacaatgctgcaaccagtgtccttatgcatgtctccttgtacccacatgtaagagtttgcttagggaaaatacatcggtcaaattcctctacagtgtaatcatatcaatttatattcctacaatgtatgagggtctatgtctctgcaatcttgccaatatttgatatgaacaagctttaaaaatttgccgatcggttaactcattagtattttaatttgcatttatcttatttctagtgggttaagtacctttttcaatttttttgtttttaaaagatggggtcttgctctggagtgcagtagtgcaatcataggtcactgcagtctcaaactcttgagctcaagggatctgcccacctcagcctcccaattagcctgactacaggtgcatgccaccatacttggctaatttttaaatttttttgtagagacaggatcttgtgtattgcctaggctggtctcaaactcctgggctcaagtgatcctcccacctcagcctcctgagtagctagattacaggtctgtgccactgcatctggctaattattattattattgttttttgtagagacagtgtctcactatgctgccaaggctgggctaatctcaaactcctggcctcaagcaattcctggaccttccaaagctcctggcccattttcagacaataattttattgcctatttttacttcttctagaaattttctgtttagtctttgtttacacttatattgaattatttttattatattttaacttacttgaaaaaatgctttaaaatttggatactcacctttgttatatagcaaagattaataattaatataaattaatttatccaagtctattccctgctttagaacttctcttgtcttgctgcagataatttaaatttgtatctggttgggtttatcagatttttattctatgccttttgattcttttttttttttttttttgccttaagaaagctcttcctggccgggcgcggtagctcacgcctgtaacctcagcactttgggaggccgaggtgggcagatcacaaggtcaggagatcaagaccatcctggccaacacggtgaaaccccgtctgtaccaagaatccaaaaaaattagccaggcgtggtggtgggtgcctgtagtcccagctactcgggaggctgaggcaggagaatggcatgaagccgggaggtggagcttgcagtgagccgagattgcaccactgcactccagcctgggcgacagagcgagactccatctcaaaaaaaaaaaaaaaaaagctcttccaggctgggcatagtggctcacgcctgtaatcccagcactttgggaggctgaggtgggcagatcatctgaggtaaagggttccagaccagcctggccaacatgctgaaaccccgtctctactaaaaatacaaaaattagttcggtgtggtgacaggtgcctgtaatcccagctatttgggaggctgaggcaggagaattacttgagcccaggagacagaggtttcagtgagctgagattgtgccattgcactccagcttgggcgacaagagcgaaactccatctcaaaaaaaaaagaaagctcttccttttaccaaattgttaagagattctcttgtattctctcttaataatttgaaagttaatgttttacaattagatctttaatctatccaaagcttacttttgtgtatagggtgagacagaaatataaattgcattgtgtatgtgtgtgtgtgtgtgtgtgtatcctcccaacaccatttgaactgtcttttgaccatttaaatgtgtctatcatttatcatattccaaacacatacatgagtctgtgtcttacatttttgttctgttccattaatctttttttcacttttcttgtaccaatattcagtgttttaactactgttgttttatcatatcttgctatattgtaagacaaatccttgttattctttctcaaagtgatcttgaatttactctcccatatgaattttgcaatcagttttatgttccaagaaagtcttgttaatttggttgagttagcattgaatctgtagattaattaaggaatcatgactatctttacaatattgagacattttatccattaacatggtatagcttgctattccgtcagatttctttttatgtttttcactaaagctttgtagtatttgcaataatgctctcacacagttttattgaatttatttctagttactttatagttttacttgttgatttaaatgggaccttccccccgcacccagttggatattgttgtcatataagagagctcttggtgtttgataactccccaccaagctatattcacttattagttctaatagtttctcaggtgactcacttggatccaagtccaccttcttgtcttagctcagaataagttctaaatgacaatttgttaaatgaatttttaaagtgattgatcattttgtagattcctgagttaccagtctgagcctgtgttctccattctgggagtagaaagctactgaacgctagctatggtcactgataacactagattgtttttccatttgtccttttcttgcaacagcaataaccaaagcaaacatccctcaaaaaaacttctctagctgaatttcattacttgggtttcaggttttaatatatgaagttcatcttttggaacagattttatctcaaaatctgaagcaagaaataaattgctatgtatgaaggcattcactaaaaaagcagctggaaatggtgctgggtgtgggagcacccatgatcaaggcaccaggaacacctgcaaggttgtgagtgaggatcccgaggctacaggaggatatgtagaataaaagtgccctctgcacagccacactttttcaccccatcccatccctcctctctgctctgcacctaccactccccacccagggcattctaagtgtgtttagcaatacaccatactaagaatcacccacactttgccattctgtttgtgggaaaccaaacactgctcatgcttctagtgagtaaacaattcaaagtaaactgcaagtagacaagagagatttaatctcctgtgtgaggaagggtattgcataagtgaagagaggaacttaagattcatgcttaaatacacgcactggaatgctgtgtctctgacaaacagaaatcaaatcagcacaaaggtaatattttacttaagcttctgtccctctgttgacattttggaataaaactttccagataattttatgtatgtatgcaaaatctacaaggcaattgactcctgtataataatgaatgcttaagaaggtaacaagactaggcatggtggcccacacatgtaatcccagtactttagaggccaaggcaggtggattccctgagcccaggagttcgagacctgcctaggtaatgtagtgagactcctgtctctacaaaaaataaaaataaaaaaattggccaggcgtggtggggtacatctgtagtcccagacactcaagaggctgaggtggagggactgcttgaacctcaggacgacgacgctgcagtgagctgtgatcatgccactacactttgcactccagcctcggagacagagcaagaccctgtctcaaaaacaagaaggtagcaaaagaagatttaatattttctgataggaatggaaaaccaaacatcgtgtgttctcactgatgtgtaggagctaagctatgaggatgcaaaggcataagaatgatacagtgaactttggggacttgagggaagagtgggagggggcaagggataaaagacaaccaatatggtgcactgtattctcctcgggtgatgggtgcaccaaaatctcacaaaccaccactaaagaacttactcatggccgggcgtggtggctcatgcctgtaatcccagcactttgggaggccgaggcgggcggatcacgaggtcaggagatcaagaccatcctggctaacacggtgaaaccccatctctactaaaaatacaaaaaattagctgggcgtggtggcgggcgcctgtaatcccagctacaggaggctgaggcaggagaatggcgtgaacctggtaggcggagcttgcagtgagctgagatccagccactgcactccagcctgggggacagagcgagactccgtctcagaaaaaaaaagaacttactcattaaccaaataccacctgtaccccaataacgtatggaaaaaaaattctgatatgtttctcctgcatttggatgaggatgtaaattcaactctaataaattacagtgtatcaaaaggattaaagggtctctccctgcattctctcctagctctgttccatcctacacacagctgctggattaatcttccaaaacaccaattttctcatgccacttttcaaaaactagcttcctggcttcctgttgtctaaaaactagtttcagatgcttttgtctggcattcaagaaggtcagtagtctagagcctcctaaatgtttcactcctgctccttccttctaccacttaccacctgtgtgctcttgggttagttattattattattattattattattattattttttgagatggagtctcactctgtcgccaggctggagtacaatggtgtgatctcaactcactgcaacctccccctcctgggtttaagtgattctcccacctcagcctcctaagtagctgagagtacaggcgcctgccaccacgcccagcttgggctaattattttaagaccggtccccctgtccctgtaaagatcccacgcacctcctccactcagtggctcactgtagcaatgccctgaaaggctgtaattgagtcatattccagcccctggactcaggagtcaggggtgatgtcgccaccacctaattgcttggattgaggatgggaacagtgattctcaagaagaaaacttggacactattaccagaagttagtacaactgccttaaagcactctgggcaaaatttaacaactgtctgttccaaaaatgcagagacatggaaacttagtaactcttgttggggcatcttccatcacatatgattcactaagggtatatcaagcaaattcaactgtaggaactggcacattctgaggcatagggtctcttatgttcctaaatttatattttaccatcgtggttctagccacttttctgtagatcagtcccacttgagcagcccagtttgctgggttttatctgtatggaatgtacatatcctttgaagtaagacgcatgtggttcaataatgtaactttttagattgcagaaatttcactgtaacacttacctcaaatggcataaaataagcaaaaacatgtattctgtgatgaatcaaacaaaatatattttgagttgttgtttcccccatttaaaacagcacatttctgatcattgtcatctgtttgtgaaaagacatgagaccaacagtcctttccacacttacggctgcagccttgtgcccatgagttaaagcctcggaatttgcctgaaactttccctgtcaatccgagatggtcatgaccaagccactttgcttccatacatcttcagtgcctccttccacacacacatctttcctggtttaaactttcatttctccagtactatagcaaaacagtatttgcaaatctcttttgaccacaaactcctaacagtcagggacttctcatttggatttccccagggcttggaattttgttttgttcatggggagggggtgagatttttaaaattgcattaatgaatgaaaccaatcaatccattgctccatgctgtgtacaaacactgtaataaatattggttgacttcttataactaaggcaataggagcttctctcaataaactaaattccaaggaaagaatgaaggtaggaaagtagctggtttatttgcacctactatatgacaggccttagtttaggtttgtttgtttgcttgcctggagacagggtctcattctgtcacccagtggtgtggtctgatcatagctccctgaggtctgtaactccttggctcaagtgaccctcgtgcttcaccctccgagagtagcagggactacaggcatgtaccaccatgctcagctaattttttttttttttttgtcagagtcttgctctatcacccaggctggagtgcagtggcacaatctcagctcactgcagctctgcctcccaggtttaagcgattctcctgcctcagcctcccaagtagttgggtgcctgccaccacacctggctaatttttgtatttgtatttgtatttatttatttatttatttattttgagatggagtctcactctgtcacccaggctggagtgcagtggcatgatctcagctcactgatcctccacctcctggattcaagtgattctcctgcctcagcctcccaagtagctgggattacaggtgcctgtcaccacgcccagctaatttttgtattttaagcagagacggggtttcaccatgttgggcagtctgatctcgaacttctgacttcaagcgatccacccaccttggcctcccaaagtgctgggatccagctaatatttaaattattttgtagagactgggtctcaaaatgttgcataggctggtcttgaactccttgcctcaagcaatcctgccaccttggcctccgaaagtgctgaaattgcatgtgtgagccaccatgcccagccagtattttcacataaacattatttcagtgaattctcacaatcctgcagacacttgcagactcagttttggtttcttacttaatgtaacacaaccttagagtgacaggtccatcagcgaaatccagcatatttgactccatgattaccaaatgcactatctccatttattggaaaaggaaaattggaggtcactcaaagagcagtgaagttatggaaatatgaaatttttcacatgactctgagattgagtgtttgggtactatcgggaaatgttaaaaatgtccattttcttttctttctttctttcttttttttttttttttttttttgagacagagtctcactctgtcgcccaggctggagtgccgtggtgcaatctcagcttactgcaacctccacctcccaggttcaagcgattcttttgcctcagcttcctgagtggctgggagtacaggcatgtgccaccaatccagctaagttttttgtatttttagtagcggtggggtttcatcacattggccaggctggcctcgaactcctgacctcaaataatccacctgccttgggctcccaaagtgctggggttacaggtgtgagccactgcacccagcccaaaaatgtctattttcaatagtggtttaaaacactcttggacagcaaaagaaataaaagttgaaggacattgtgacagcaaattgattgtatgggaactctggtgaatgcgaatcatttttaaattactttttttgtaaagtgcaaaacaacaatagcacccatttgcgtcatactttatagttcgcaaagcacatgggaaaaataaaggtaatgatggggatcgttgcaattcataggaaaggaggcacgaggaaatgaaaatgaaagggagtaataactacgtaactagtcaatcttccttaaaaaaaaaaacccttaaaatataccaccatcttctatttgatataatgcagaatgggaatgataaaaacatgaattacatttcagagtttcaaaaagcaaaccagctttatagcaatgcttgaggttgggctgctaacaagctcactcaactagtgtttcctgacggccaacgtcagaataattccatctccatgagaagtacagaaagaaccacaaaccaaacctccaaattgattctaagataaaatacccttaaaaaaaatttcccttcctatccgaaggcagaccaagaggaagtttatcctcccacctacaaattccccagagagctttcatctagaaggtttgactctggccagacaaccagcgagcatcttctcgcaatctgttgcttcttccatggcaaactccagagaattaagaagccaaactcaacatcgccatgggcctcaggacgactaaacagatggggagaggcactaaagctcctggtcaccaagagggtatgtaggcatttgctgtcttcctggatttctcagagctgagtttttagccagaggttgcttatttacgataattcttggatatattatacactaaatactattattatctttttcgacccaacttttatctttctgttcttatgtgtgaaggcagagaaagattatttagagctcttcaaagattcctatttaatttaaaatgcctgtcgccttcctataataggcttatgatggatgatagctttagttaaaatgtagcaatcttaaatatattcttcataaccaattccaacgtgttctcacttaagtaatgggtataaaaccccacttaagcgtaatattttaaatatttgaagccatcttttctgagagaacccgaagctgttttttctagagaagctgtgagtgtgtattgggcgacttctgttcactccttttctgcagcactcaccctggaggtcatgtagtaactaatgccaaagaaaaatcaaaatagaaagtaccagcgtgtgccatcatgcagcggcagagcctgcttaaagatcaggaaatttgtctaaatatcagatcgccggcgggcatctcagcccaggcctgtgtaaggggagttctggtgtctcagctgagggcgtgagtagggagccaggaaagcgacccgcgactgcagccgtttcttaaggccagtccttcgctcgcagtctgtcccgggcggcagtcgtgtcagccccccgctaggacccgcccagggggacgtgggtaccgggcaggacgcgcgctctgggcgctggggacgcccgggacactcggggccccgccttgcgtcccagccccgggtcgcggcaccccggctcccgccccgcgcctctggagggaggtaccgagggacgcgcagcgaaggggctttgctaattgccaaagcaggaagtgagctcgtggaagaagcgaaggaggagaagaagaagggaggggaaggcggaggagggcaggggcgcgcagagccacggtttgctccaggcgcgtcggaaccgcaggacttttcatccccgtggtcccacggtcctcccgcgccccggaggcctgccagccccgctcggacgctcgtttgcccctaacccgccgccatggcttcaccggacgaccctctgcgcgcaggtaaagggacacagcgccgcgcccgctcctggagcgagcaccgcggggcgggagctcgggaggcgctcgcagcagccgcagggctatcgaggccgggcctcggcgacccccgagggaggcccgggaaccacccccgacccaggcgccagacccggagtcgcacggggctcccagtccagccccgcgagcggctgctgaccgcccctcccgcgctcgccagggcccctgccccgcgtcagccaccgcgcgccttccccctgcccatgccgcagcccccgtggcttttgttctggactcgggatgccaggttgagacacgtcctgcaaacctctggcagaaatgggcgcaagggggtggatttcgttttcgcctcccgggctttttctttctccccgctcacatgccttctcattactcctcttcctctctcccattgcactttgatgaaatggttttgtctgtctaaacattggccctcggagctatttcatcagatagtatccgcagaatcgagaggcggatcccacctgtgggatcccatctgtgattagaatggcctctagttctgtctttattttaaaatattgtgtgttggtacccgaggtcggagtggagatttttctctattctctcacgtgaatctaaaatccgtcccagacctcgctttcctggagttctctctctccgctgtcctataacctagacggtgacatccgtgggtgtttcttgaacacacgaatgaatgatctatccctcagagtacactggggctttacttggttttgttgaggttggaaacactgaagagagttacacagaacctgatataaccgtttagataaacgcgtttcctatttcatttcttgagcttgggcaggggccgagtttgaatgttccatccttaaattgtggcttcagcagtcaaaaggagacagtgtgtctgcaggtggtcagaagactacacccaacaactaagttggcattgtgatggctgggtttgggggcgtttcttggaaacttcaaagaaagatctaccttttttttttttaagtggggattgttaaacattttatcaattggatgcggaaaataaatacattgtctagatattcttccccatccccatacctattgtttgaaaaaacagaaggggaaacaaagggagaaaccctcctactgccccatcccactccactcctaccctagcatccacctccttttctgagaactgaattgacaaggtgccaaggggtgttttaggctggattttactactagtggcctcagatctcattaaatgatgattgcaggggtggggggtgggggaattcaaaaagatcttgagagagatacactgcatggagataaaatgtaaaatctacttgggctcccctaaatcgacagtaccaggcaagatgggggctgggaaacagctcagcagtgaccacagtgtgtaaaaagctcagtggctgggtgcagtggctcaggcctgtaatgccagcactttgggaggctgaggcaagaggattgcttcaggccaggagtttgagatcagccttggcaacatagtgagaccctgactctacaaaaaatagaaaaattagccaaatgtgccagtgcatacctatagtcccagctactcggggggctgaggcaggaggattgcttgagtccaggaggtcgaggctgcagtaagccactgcactccagcctgggtgacagagcaaaaacctgtatctcaaaataaataaataaataaataaaaagctacaggttccagatttcccaagatggtgttcttagtctgcccagcccagccaaaatggatgtgcacaacctggaacaaatgggcaacatggaacaaagggatttcgaaatcccaggacatgtggaggagtgagaggacagaggatatgatgataagagggcgtcatgtggaaagaatctgtctctttgacttcaagaggtagaacccaaacctgtcggtgaaaactttagagagagatggatttgggcttcctacaaagagaaaggaggcctcctaagggtgagagctccccaccagttggcagaggatgctgaagaacatacttgaccatctgaaagatgatccaaatgtccattcccgctctgggactctattctgtctataaaatgagcgctcctccatttaaacacaggcgcacacacacaccccaatttccccttcctaacatattgtttcgtttctgcaacccacaggagacatccccttactcctatttctgtaatgaaaccatagatggtgcccatatcttgagctcgctttaccccagaccaagtgaccatactctctcgcctgatttcccacactcttctcccgcctggtgttttcacaccattccaacgtaggttttcacacccactcttgccttctggtaacctattctgcaaaaggttgccagggccatcttttattttatttttattattattatttttcaagatggagtctcactctgtcacccaggctggagtgcagtggcgtgatccccactcactgcaacctccgcctcccgggttcaagagattctcctgtctcagcctcccaagtaactggtattacaggtgcacactaccacacctggctaattttttgtatttttaggctggtctcgaactcctgacctcaagtgatccacccacctcggcctcccagagtgctgggattactggtgtgaaccactgtgcccagccagttgtcttttaaaaacaaatcggattctgccatttgtctgtgctggctttgaatccggtgctggctttccaacactccgacagatcctcagtccttgaggcttacacactctgtgcaatcaatccctacctgttccttcacttgcctcacctgacacctagcttgacccctgctctctgcacgcagccgtgctgcctcctttcatttccttgaagcctcttgcaccctcgtgcctcctggcctttgcaaactttgttcctgcggcctggaaggacccctgcattccagccctcaccccatcctccacccacccgtttccttctacttaacctccagatttcagctcataggtcaccgggatccagcccgatgttatacatgctcagcaaaccctgtacctttcctttctggcacctgtcacaatttctagctgtgattatttggccaccgtggctatttccagtaggaaataaactcgtggacagaggtcatgtctgtgtggtagctctccctaacactcagcatagtactccgcacatagtaagccctgggcaaataccacctcagtgaatgaaggaaggttataaaatttaaccacaggctctttaaagagttggggggagaaaaagctcttcccgtattggcattttaggaacttactcatcgagttagccgtattaactaagttttctttgtaaagttaaagtaagatgtttgtatatccacgtgcatataacaaaagtatgtatatgattatagtatattatgagttaattgtatttatttatttattaatttttttgagacagaatctcactctgttgcccaggctggagtgcaatgatgcgatcttggctcacggtgacctccacctcctgggttcaagcaattctcctgccttagcctcccaagtagctcggattacaggggtgtgccaccacccctggctaatttttgtatttcttttttagtagagacggggtttcaccatgttggccaggctggcctggaacccctgacctcaagtgatctgactgcttcagcttcccaaagtgctgggattacaggcatgagccaccacgccctggccacaccctggccatgagttaattttaagtgactttttacattgagaaaattcacaagactgtcacagtcacatggaaggaaaacaatgatggtggttatagtgtagctatcaccctgtgtctctcccactgagaaacagtctcacaatggatgagccagatttgtctgtcaaatgtttgtaaaatctgtttgttcatgattgttcatacagatagattttacagacagaaacaaacaaccgggctttgaaggtctgggtcaaaggtggcacaattccttgcttcgttgcagtaaggcaagtgccgacggccacagagcattgcaaaagagcacattctccctttgttctgagactccacaccgcagggctgtttcctgggggaaccctgggcctgggccaccaactcaggacagccccagtggtggcattcacctctcactgcccctcctgtgggcttcaatgggtccaaggtggcaacctaccctcctgtggcattgggcgcagtacccaggactaaaggataaaccacttcctggagcactcatatgtgcaaagctggaccagccaattctttctgcagatacaccaaagagagggatggcaatctgtggttttcccttctctgctccttctgccctttctctttctcctccacgtgggttttcccaatgctcacttcatttctcttcctttcttacaacgcctctgctttgtgagtttccttctctctacccaagcattttccctgagctttatctctttgtttgctgtcttccctcatcctcccctgccctcttctgtttgatcccccgtcagtagcctggctgacacacttaatgctcggctgccctccagagaggttgctgtagggatgtacttctgtgatccttgcccctttcccagcttgttcagcccctgctgcggggtctgaggttgacagagtagccgaggtcagggtgaggtgctgaaaagacagaggaagctcaatgaaacagtgtcagcaccaccacgcagcagcacccctgcagctctgagagcttctggaatcctgaatatgtctcaggactccagaaaaacttccttttgttttttctgtctcgctctgcactcaggctggagtgcaatgacacgatcttggctcattgcaacttccatctcctgggctcaagcaatcctcccacctcagcctcctgagtagctggggccacaggcttgtaccaccacacccggctatttttttttttttttttttttgtatttttagtagagatggggtctcgccatattgcccaagtaatctcctgaactcaagcaatctgccctccttggcctcccaaagtgctgggattataggagtgagccaccacaccccacctccaagccttttttatatccaataatgacaatagcagtcaaaagaaaagttatgggctgggagcggtggctcacgcctataatccccagcactttaggaggccgagggaggtggatcacctgaggtcaggagttcaagaaccaggctggccaacatggcgaaaccccatgtctaataaaaatacaaaaattagctgggcacctgtgatctcagctatatgggaggctgaggtgggagaatcacttgaacccaggaggcagaggttgcagtgagctgagatcacactgctgcactacagcctgggcgacagaacaagactgtctcaaataaaaaaaaaaaagctatggtacaaaacaacacacaaataacaaatgagaaagaaattaatcctgcaatcacacattcaaataattgcctgtaattcttcactagaaagcacagtgactgcacttttctggctcaggatgcttgggaaggccaggaagtcctgacatacttccttgttttctctgaaaggacatctttagagatgtttgaacttcctttgagaaaccgtctctaggaagcattcaccgctatctgatgtcagaatgcggcagtgcagtcctcggccgccccaccagtgtctgtttcgggttatgtgctgaggattctttctggagaggctgttgcatacagtacgtgtttcccagcattcctgaagaggctctgatttggtagatgatgggatttgagtctttgagttgaagaagagtagatgagatttaggatttagagtggatgctggaatgattaacgcttttggggatgtcgggaggaggcaaatagattctgcatgtggaaaggatgggcagggggcagagtgtgaactgttacgggttgaattgtgcccctctaaaaagatatgttgaagttggaattcctagtacctcagaatgtaactttcttcggaaacagagtctttccagaggtaaccaattcaaaatgaaatcatcagagtgggctctaaaccaatatgattggtgcccatataaaaaggggaaatgggacacacagacactcaccttctcaagagagtctgtcgggtggtcagtgtatgaaccacttctattttattttgagaccaagtttcgctcttgttgcccaggctggagtgcagtggtgctgtctcggctcactgcaacctccacctcccgggttcaagcgattctcctgcttcagcttcctgagtagctgagattacaggcatccatcaccgtgcccagttaatttttttatttttaatagagatggggttttcccatattggtcaggctggtctcaaactcctgacctcaggtgatctgcccgcctcggcctcccaaaatactgggattacagatgtgagccactgtgcccagcccacttctattttaaattttattttattggccaggcgtggtggcttgtgcctgtaatcccagcattttgggaagccaaggtgggttcaggagtttgaaaccagcctgggtaacatagtgagacccccatctctacaaaaataaaaataaattagccagatgtgacagcacatgtctttagtcctagctactcaagaggaggtggaaggattgcttgagcccaggaggtggaggctgcagtgagctgtgattaagccactgcactccagcctgggtgagagagtgaaaccctgtctcaaaatttttattttattttttattattttaaataagtagaaatgaggtctcactgtgttgcccaggctgttctcaaacatcctgaactcaagcaatcctcccaccttggcttcccaaagtgctgggactacagatgtcagccaccacacctggccatgaggcacttctagaacctgattatactggaaaacaggcagattatgaagccagaaagtcccagatacaagttctggcttttccacttacctcttaccctgtgatcttggatactcaatgtgtgaaaaaggggatgcctaatgccttcctcagggttactggaaggcttagctgagactgtgtgtaagccatgccatgcagagcagacgctagggaagcttttaaacttttcaaacttgtcttgtcttttcttttttttttgagacagagtcttgctctgtttaccaggctggagtgcagtgttgagatcttggctcaccgaaatctccgcctcctgggttcaagcgattctcctgcctcagtgtccccagtagctgggattacaagcatgtgccaccacgcctggctaatttttgtatttttagtagagatggggtttcaccatgttggccaggctggtctcgaacttctgacttcaagtgatccacccgccttggcctcccaaagtgctgggattacgggcgtgagccacctgttcgaacttttctaagtgagagctttgaaagcttttttcttttcttttttctttttttgagaaggagtctcgctctgtcgaccaggctggagtgcagtggcgtgatctcgactcactgcaacctccgccttccgggctcacaccattctcctgcctcagcctcctgagtagctgggactacaggtgcccgccaccatgcccggctaattttttgtatttttagtagagacggggtttcaccatgttagccaggatggtctcgatctcctgacctcgtgatccgcctgcctcggcctcccaaagtgctgggattacaggtgtgagccaccacgcccagcctagagctttgaaagtttaattgtgaactttcagcttggaggtgctctttgacccatgtggatactactactcaccactcacggacttttaaagcaggaaggggatgcagaggtgctctgttcacctcctgagatttaagttggggatttaggacccacagaaagaaaatgagggtgcagcccgccctgcctgctctcacccgcagcctctgtgagccaggccaggtgccctcgccagccctgatgcatcagttcaccaggtttctctcatgccttttgaggaactttccagaatatgcttgagggagttacacctcattctcactgccggcagagatatccccagcagtcagttaccagctaatttgaggtgatctgagccttgtgcagagtcaccgacctgggggagcccaggcagctttggcagaaaagcacagcctggcataagatggcagccatgagcagaggacagatcccgcaccggccctggcgaaaccactggccttgtctccgatgggctcacgtggccccgcttctcctctgctcctctgcacgtcctattagatatcagagccttgcctgaaggctcagcctgctgttaggcgggggctgggaaaaacaaacattttaaagcttctagataaacgatttgattttacacttaatagtatcgtaaacatgcaactccaagttcctaagaaagaccttagggcagctttccacttctgaatcagtctcaaataaccaggatctgctctcctccaaataacttccctggtacacactcacatctggacctgtgagaacaaaaggagtctgccaggatctaaaataaaggccagggagaaggtgcagtttcagatacagtgcatgggcgccactgtgggcctgggtcaatgagtgtatttggcagtaacatgtatgtaagaacttaatccacagcttgatataaggcaaaggctgataaagtcagaaccgcaatcagaaaaatcataaaagacctgactagcctgggcaatatagcgagaccccgtctctacaaaaaacagaaacaaaatcccccatacattagctgggcatggtgacgcatgtctgtggtcccagctacttgggaggctgaggtgggaggatcgcttgtgcttgggaggttgaggctgcagtaagtggtgatcacatcgcggcactccagcctgggtgacactgtgagacgccgtctcaaaaaaaatgtctggcgcggtggctcacacctgtaatcccagcactttgggaggctgaggtgggtggatcatctgaagtcaggagtttgagaccatcctggtccaacatggggaaaccccatctctactaaaaatgcaaaaacaaatcgggcatagtggtgggcacctgtaatcccagctactcaggatgctgaggcaggagaaacgcttgaactcaggaggcggagattggagtgagccgagatcacgccactgcactccagcctgggcgacagagtgagactccatctcaaaaaaaaattaagtaattaatttttaaaaaaagacctgaaaatgcctctaacacctgttctaaaagtagtgcctttcccagttcccctctcacttcattgttgtgcttcagaaaacaaaaaaacctaaattctctgtgtctttctcatcttaagttccatttattctgagatgtcagaccgaagcaagagactttgtgcctataaacctgtgatgtcttctgtctctatcttgttggcctcataaccctccaacacaagccctgggatctcacagaactcggtcagagtctgaggagtgttgattgaaattcacccacccaggtggttcccaaatccagaataatggtagtaagctgagtgtgggatccggagacttggaactcctcatggtgcagaggaagagcccgaggcttagaaagcttacgtgacttctccaaggtcacacctctaggcttgtccaaggccacagctctagacttgtttaaggccagactgctaggtcttagtgatgtgccactgaggaccggtccttccttgcttttaactgtcctgtgtgtgtcctcaatgatgcttttttgtggctctgcctttcccagcgatctactgcattttcctctccttcctttctttttctttctttctttctttctttctttctttctttctttctttctttctttctttctttcttttctttttctttctttctttccttccttcctttccttccttccttccttccttccttccttccttccttccttccttccttccttctttctttctttctttctttctttctttctttctttctttctttctttccttttttttttctgctcattctaattttcctgtaggaagcaggattaacttgtcctggacgcagcgggcattgtttgcagaggatggtgtcagagcatttaaagcccccagcctcaccccacccctggctccacactccaaacccatttacctgaaatttcactgtgttgatgctattaacaagccacactcctggcaggatggcatttttaagccgtatcctccaggtaccctgtagtgaagatgaaatatgtgagactaggctgtgataggaggagggagaagggacttcgggctattttgtggtggcttctaccaccccctccccagctaggaaccagcgtgtgagaaggatgggaaggaaaaactggaaaaccgaatgcacgtgtgtccggctgtaaggactcatctgaagcatcgtcatatgtcacttaacaacagggatacactgtgagacatgcatcactacatggtttcgtagttggtgagcgtcatagagttcacttacacaaacctagatggtgtaacctacaacactcctgggctgtttggtacagcccattgctccaggactacacacctgcccagcatgggaccaccctgaatacagcaggcggctgtaacacagtgctatttgtgtgtctaaacatatctcaacatggaaaaggtatggtgagaagatggtggtctaatctttatgggaccaccatcatatacatggtctgtcctgtgactgtacgttaatgtgtcatgttctctctcttctctgtggctgtgctattccctctgcctagaatgcttttccctcgctaccatgtcaactcatccttccagactcagccctcaggccctctgcaggctcttctcccacccctcctctctccgggagctccccaggctgcgagtgctgggtctgggtgtcccctggttgtcctgcactgccactgccttagcactaagggctctgtatcattacttgttgcttgggcagtaagagttctgccatctcagggaggcattagcaacacaatttgtttttcattttctttctatccatttaaatccaaatctgagtgtgtattgcactggactggcaggaaattccacttcagtcagaactggggctctgtcccttagggccacacaggaatctgaggggttcatgtggtgctgggaaaaactaggaaaggacctcaaatttgtagtgcatcagggaggcattgctgtcttatggtcctggcctgagaagtcccttgagacccagcagccctctgtttctgtgctggacacagggcacaggtctctttgctggggctgggccgcggtccccgggggttaggctgctctgtgctgtctctgatgcagtcttgccaccttcatgctctgcagatgtctgtatcctgctccatgggaggcaatggcaaaggctctctccattcgtccccatttctcttcagtgactggaggctgcataaaacaaagagatgttgccttctcgaaacttctttgggcattatcaacacctgcagggcaaagaaactgtggaaagttcagacacattctcagctgggaaacacctaggaagaacacacacaaattattatcttgacaaattgtcctgctgtgcttatttggatccccaaaggcattcccaggacctaattcctagtctgcaatatgtacttaatgaggatttggatcaaaagtgaatgctgactcttggcggacccacgactgccacttagggtactgcaggtcgttcactgcacaaatctggaggatcccacgcaaaaagatttgattatttactgagacagctctctggcagatgtcttataaagcattttggagatgggaaacttttctaatttgtactaattaggtcctgactgaggtctgtgcctttttccgtatttcccctttaaattccttcaatgcatcaagtgataaagtatcagaaacaaaatattgagaaatcaagattatttttgataaaaaactatggttttttctttattagtccacataaacaacattcagaagattaagaaaaatgagttgcagcaaaataggaaatcaggaaagaagtagattcagaatggagtcattcctgccgaaggtagtgtcaaattcagtaggcaagagagtcattaatgtgatgactgcatagtttgtggttgtttgtaactctgggtatttgaagatatttataggtaacctgttccaaaatatggtggggttttttatgtagttactttttatatttttaattaattaatttatttttttgagatggagttttgctctgtcacccaggctggagggcagtggtgtgatctcagcttactgcaacctccacctcccaggttcaagctattcttctgcctcagcctcctgagtagctgggactacaggtgtgcaccactatgcgaggctaatttttgtatttttagtagagatggggtttccctatgttggaccaggctgatcttgaactcctgacctcaggtgatccgcctggcttggcctcccaaagtgctgggattacaggcgtgagccactgcgtctggcctatagtttctttttattaatctctttcttgatgcaatctgaatctgttcctctttattttgtctcaactaataattggaagtaagactttcaggccaggtgcggtgtctcatgcctgtaatcccagtgctttgggaggctgaggtgggaggatcgcttgaggccggaagctcaaggttgtagtgagctatgattgtgccactgagtgtactccagcctgggctacagagcaaaccctatttcttttttctttctttctttctttttttgagatggagtctcactctgtctcccaggctggagtgcagtggcactgtgttggctcactgcaacctccgactcctgggctcaagcgattctcctccctcagcctcctgggtagctgggattacaggcgcccacctaatttttatttttattttattttattttttagtagagacagggttttaccatgttgaccaggctggtctcgaactcctgacctcaagtgatccacccgccttggccttccaaagtgctgggattacagcatgagctacctcacccagccaatcctatttcttaaaaaaaaaaaaaaaaaaaggagtaaggttttcttcagcctaagtaaaattacttgcctctgtatagagacagttatcaaaggactcatttgtggttttaaattaaagcaaacccgctctatttgtttgtttttgttctttttacagatcatatggtaaaggaaccagtggaagacacagaccctagcactttatcctttaatatggtaggtgacaaattttacactaatggtgataattattgttttgctttttttctttgttatttctttacgtttttattactcagtatttacatgtgcatcagaaaccccaaagtaagatttttctaagataactgctttatcttggtattctacgtgataataataaactttgggtttctccaggctaaaaatggcgttagattcttttcttcttttgctcatgttggaggtgatattacattatgtgagggctttacccacttccctggtttttttttatttcatttttcatttttatttttttttagacggagtcttgctctctcacccaggctggagtgcagtggcgcgatctcagctcactgcaatctctgcctcccaggttcaagcgattctcctgcctcagcctcccaagtagctgggaccacaggcatgtgccaccatgcctggctaatttttttttttttttggtagagtgggggtttcaccatgttggccaggctggtcttgaactcctaacctcaggtgatctgccaccctcggcctcccaaagtgctgggattacagatgtgagccaccgtacctggcctacttgcctgtttttaatactactggtctggtaatggagcagcctgggatgccagatggacacacgctattggatttacctcagttacagcgtttagttctagcagctgccttctgagccacatcctctccccaccctcccgtaaccattctgaggctattgctttaagggtatccaaagatttcacatatattggttttttaaaattcattttatggttttattattattatcattttaatttcagattccatgggtacgtatgcagctttgttacgtggatgcatagcataatggttaggtttgggcttctcataaatccatcacccacatagtgaacgctgtacctaataggtaatttttcaaccctgagccctcctcccaccctccccccttttggagtccctagtgtctgttatttccatctttatgtccatgggtacccattctttagctcccacttataagtgagaacatgcagtatttgattttctgtttctgagttatttcacttgggatgatggcttccagctgcatccatgtggctgcaaaggagagaattgtgttcttttttatggctgccatcattatttttcaacctcccaagatcctcccaaccatcccttgagatggtggggcacgtacccccatcctacagatgcagaaaggacagttaatggaagtgtgccgccacctagaccggagccctgtgctcctgcccagcactgcttcttgctgagggccaaagcggtgctctctgtcaggcagcgtgtgtgatgggcatattgtgtaggacacattccttctgttccagatcctcagaggatgggatctaccaactcatgaaaagttttggttaactgatttagttacagcgacacagaatacacttcatgtaattcaactaaatgtctttaaatcttaggtgtcttgcggacctgaggtgtttgttttcctgtcctttaattacccctggcttggtaaattgtagacagcgtagggggtcaagctttgatacccactggaaattcctatgaaaaattctcagtctcttcactctgatcaaaatggaacgaagaacaaccctgtggccatggcttatacgtctctggagtagcttgttactaaagcctttggtttctataaagtgttattcagtttgccttctttcccttcccactgcccccacctgtgactctccagttctccctggtatcctgcttacttcctgataccaggttttctttccctcccttggagctatgtccttatgctcaccttggggctcagctacctctaattacttctccatgctggggacaaagtgatctttccaaagtgtccctcttactagtttcttagggctgtcgcaacagaataccacagactgggcagctttcacaatagaaatgtatttgctcctggttctggaggctggaagcttgaaatcaaggtgtcctcagggccattctccctctgagacccatagggaagaatctttccttgtctcttctagcttgtagtggttgccagccatcgtggaaactcctcagcttatagaggcatcactccgttctctcactcgttagcacatgaccatcttctcccagggtgtttgtgtctcgtctcttcttctccttctccctctccttcttctttcttcttcttcttcctcttcttcttcttttttttttttgagatggggtttcactcttgtcgcccagctggagtgcaatatgcaatggcgtgatctcggctcactgcaacctctgcctcccaggttcaagtgattctcctgcctcagcctcccaagtagctgggattacaggtgcccaccaacgggcctggctaatttttttgtatttttagtagagacggggtttcaccatgttagtcaggctggtctcgcactcctgatctcaggtgatccgcctgccttggcctcccaaagtgctgggattacaggcgtgagccaccatgcctggccctcgtctcttcttttaaagataccaatcatattgggtcaagggcctaccctcctcataacttaactaattacctctacaactaccctatttccaaataaagtcatattctgaggaactgggggttaggacttcaacacatctggtttgggagacagaattcaacccacagtattcccgctgggtacaggatttagtatataccccttgacatgggagatgaggtcctccatggccttacctcagcatccactgctcacctgctgacccagccctgtgtagctgtgtggtgcttcttaatacgccatgccctctcaccctcccagggtagcaataatgctgttccctctggcaaggaaaatctccctgcatctttacctaatgaactcctgtgcttcttcccatctcacttcaagtattcccctgatctacaaagccttacttgccttgggactttcaggtgctcccttctccgtagcccaatccctatttgccatctcagagaattgtcattgcctgcttgtctgacttcttgcaagactgtgttgaccatcttccctcatgcaaagtcagtgcaaggcaggtagcaagtttcccgagaacctagaagggcatcccacctaaatccctttgcttatctttcttggtctttcttagaaactgggtccgtcatttctcatctaatcccgccttcctctgtccacctccaacagactctctgtttcagttctataccctccgctcttccagccacctgatcccttctcctgccatgcctgccaccagcaactactttgctgcttcttctgagttcatccaattctcagccattctctagggctagctccagcatcgtctttctaggagccctgaacttgctctggcttctgtgttcttccatgcagactttcagtggatgtttacttaaaactatgttacaatctgggaatgcacagattgtaattccatctctgggaaaactcagtctatctgaggaaatagacaagtactgtttatttttatttatttatttattttgagaccaactcttgctccgttgctcaggctggagtgcgatggcacgatctcaggtcactgcaacctccgcctcccggggcaattctcgtaactcagcctcctgagcagctgggattacaggcacgggccaccatgcccagctaatttttgtatttttagtagagatggggtttcaccatgttggccaggctggtcttgaacttctgatctcaggtgatctgcctgcctcagcctcccaaagtgctgggattacaggcgtgagccaccgcacccagcctctttttgaaacagagtgataaatgttctagtacaggtttgtgttcctcggtcttgggagtagaatgatgagaactaatttgatctggggtagaactgtaggactattctgtgtgattaatttttatttactaatttatttttgttgggagaggttggaggcttctagaagttttaaaactttactgcccagctccaaagaaactcccaggaaaggcacttaaaacaaaaccctcgattctccatttctttctctctctcctctcttggaggaagacatgggtggagagctacaggaaattgttcaggtgtaattttgttcaggctgaaggacagggctgagtggagttgggagctgagcaggggttaggggacagggttgggaaattaggctccttttcattcctctcatggacgttttcagaaatggctacattgtttagtctgaaataagtttccggaactttagatatcggcatgtaagtatgaataaatgaaaagaaatatatgtgattgtgagaacatttgctattttgaattcctgtaacagtattactctcaactgatgcattgaggaactgtgctgaattctgcataattactgatttttagatctttgtgcagtcagtagggaagggatcttttgaatcatcctgtctcagtcgacccaggccagagctctgcaatagtgagtactgcccagaacacatgcttattgaccccagtgactattgcagaaacggtgagaagaaatgcatctgtcctcataattcatgacaacaaatgctcctcaattgtaaactgcaggaggctagcactgcagaaaagagaggaagtgtagtttcgtggtccaagctgtggaaatttggaagccttattctgtttcatgttccagcattaacctcttgtcaaccttgatttcattcctgtcgactgagaataaacacaatcaatggataaggccagttgataagtttgaggttaaacattttcaagtttttaattgaagtcataactttcccaagacaaagctttcttttcactttgatcttacatggcatttaaaaataattctcctcttttgttggtttctacagtcagacaaatatcccattcaagatacggaactccctaaaggtatgtacagttaaaataactacttgaacatgtgattattttaatattgtgaacaaagcactagtcgacctaatttttcattatttaaaattgtaaagtagaaacatgcccatagattagctcgtgacttgtgacataattgtctcagaaattaattttttctttttttaaatagtatcttttaaccttgcaatagaaataaattttcttattaaaaactgtaaattattccataacaaattatgcgttaaattcctgtggtgtttttaacaggcataaaatgaagacagctgggactttgggttgcaaagggagagaaatctaacactaatttgtttaaaaagcgggaactggccaggcgcagtggctcgcacctgtaatccctgcactttgggaggccgaggcaggtggatagcctgaggtatggtgtgggcgtggtggcaggcacctgtaatcccagctactaaggaggctgaggcaggagaatcgcttgaacctgggaggcagaggttgcagtgagccaagatcgcaccactgcactccagcctgggcaacaaactccatctcaaaaaaaagaaaaaaaaagtgggaacttgctgactttggggtctttgggccctgctgcatccaagcatctaagtgaggctgtcaggctgagtccatctcatggctctgtcttcttccatgttggctccattcttgggcaggatttccccccgtggagggaaagatgattactagcgcctcttgctttagatggcgttctcaaggtggtggaggaagagggagcctttccaccagaacggatagcacaattttagagatgattgtgattgtggcagttcaggtcatgtggccatccttaaatcagctattgtcatcaggaggatggaggacattggccaggtctgagccttgagatcgggtcggggaggagggtcatggagtggattttgcccaaaccactgttctgtggctagacaaaggggtgagggatgcttgttaggcccaaaagcaaactaaaaaagctatctttgataacccatacacttatgctttaggcatggtgcagaccataggggtggctagaccctagccttccataacctctcctgctgggtggtcagcagggctatgttccttttttattattattattttttgagacagagtttcactcttgttgcccaagctggagtgcaatggctcaatcttggctcactgcaacctctgcctcccgggttcaagtgattctcctccctcagccttccaagtagctgggattacaggtgcctgccaccacacccggctaattttgtatttttagtagaggcggggtttcaccatgttggtcaggctggtcttgaactcctgacctcagatgatccacctgccttggcctcccaaagagctgggattacaggcatgagccacccactgcacctgggccctgtgttcctttatggaggccaagttgcaggttgtcacagtggggcctctaccttgtagtctgctgacaatccagagatgaggggtgggatggggtggagttggggacaatcagatctgactagtttcagagatggcaggggcacctggcatcctggtcaccatggaggggtaggcctgcccagcacgcactaacgtgagtctccccagcagttctcatggtagtggataatcgtagagagatccccagggccaacctgtccagagtttggccaaagctctcctcctcttctccccctactattccagacccttctccctgctccctgaaatgacaccattagagtgtcctttcttttctgtccaaaaaggctgtgagtggcctcagcaagtggcttcaggtctcagggtctctgtttcctcctcagcacagcggggaggacaaggttaccgtccacctcccagggtgctggtgagaattcagtgaaataaatcgagaatggtgcctggcacttgtgaacaccagacaggggtgcagggaaatccagccgaagaagtgtgaaaaatcaagcttaaaatcaagccttcagtcagaatggcaaagtgaaactgtcttagaaaaagacggagctgtaatggccctagcattgaatgtcgtggagccatcaggctcaatatctttttttgtcactcttaagtgtgatttcctgttttgaaagaaaaagattgttgcttagcaacctgatactacagtaattgtattatcagatttctcctagaatttgagttctacaaaaatcttaatgaatttataagtaacgtgaatgtgaaaaccataccctaggtcttccctttgtccttattcatgctgaatagtatttttttcttagatcaaggaacagattggagtgaacattattattaagtgcataatttcttatctccaaatgaatacatcattttatatgtaaatgaaccatgtctagaagtttaaaaacttactcctacatttgcgctcaacaatataacaacttgatgtctgctagcatttttctttgatgtcactagtgggaccaatactatcattagacattgtggtaattttctcattaaagttgtttatggccgggtgccatggctcacacttgactccaggagttcaagaccagcctgggcaacatggcgaaaccccatctctacaaaaatatataaaaaattagctgggcgtggtgacatgtgcctgtaatcccagctaccagggaagctggggtgggaggatcacctgagcctgggaggttgaggctgcagtgaggcatgaacttcctgggctacaccccagcctgggtaacagaatgagaccctgtctcaaaaataaataaataaataaataaataagttgttttcagggaaagaaaaatccacgtgaattaacgaagagactgatttatagacttaaaagcaattgtaatttaattctataaaggaaagactaggacgccaacgtttaagtgagttttaaggaggccagctttatttactagaagcatcatttgtaattagcgttaagagtttcacaaaatctcttacatactgctaacatattcctacttcattcacagagagtataaacctttaacagtggccagaatagattggttttgaataatgtggttttaataatcagctgtggaaatctagtgtaatttcatttgtcagcatctgtttttgaggtgaaatgtgttgatataaattatatctgttttctcatagggcataaatgcagaacttccacctcaagcagccaccccctgattttacagtttttgggggttcatttggtttggggctcttttctgatggctgttctgtgagtctgcgggtactaagaactggtgagattgaggtttattttccatcacgtgattcccagtatctcgcagaagctgctgcttgattgttctgaagaaaatgtgactgttcacattttcgagagaaaaatgtgtttggaaaaggaattttgatttttgagccactatttgtaatggaagaaaattacacttaaatacacgaatctaacaagattttatcatcttcattttctctcgtgtccctgctcttttctttgattattcaaaaaaatgttatagtgtatttagaagttaaagagaagtaaggtagacttttttttttctcttcttttctttttttctttttttttttgagacggattctcgctctgtcgcccaggctggagtgcagtggtgcgatctcggctcactgcaagctctgcctcccaagttcacgccattctcctgcctcagcctcccgaatagctgggactataggcgcccaccaccacgcccagctaattttttgtatttttagtaaagacggggtttcaccgtgttagccaggatggtctcgatctcctgacttcatgatccacctgcctcggcctcccaaagtgctgggattacaggcgtgagccaccgcgcccggcctcttttctttttttctgagtcttgctctgtcacccaggctagagtgcagtggcatgatctcgactcactgcaacctttgcctcccaggctcaagcaattctctcacttcagcctcctgagtagctgggactacaggcgaccaccaccacacccagctaatttttgtatttttagtagaaatggggtttcaccatgttggccaggctggtctcgaactcctgacctcaagcgatccatccacctcggcctcctaaagtgttgggattacaggcgtgagccaccgcacccagccaaagtaaggtagactaatgctacccttaagaagtctgaggaacttgaacttaaatatagatgctgtttgggggtgccttttagaacaacgtgttaattaaatgtagaagtagttcagtttgaacacgtgaagagaaaacaaacaagtactaggaaatcactaaataattcaaaagtagaaaggtctgtcctaaaactaggaagccaatatgttgtatttgatatgatttcctacctcacggattgataatgatgccatgtgaagagttgtccctgttctcacgggaaactcctcatcctcccacctgtgtggtttgctctgtgttctcatcccgcttgttcaataaatacactccccgcccccgctccccaagccttgacagagaccctcttgggaatcttctgttacagtaaactaaaaaccaacctgccctcccctcccagtcatggcaagaatacaatggtaacaactctccaaaacattttttaatcttttgtgcataagaggatagaggggacggagaggactatgaccatgggagcatttggaaagccacctgagaaaagtcgctgttaaattcaagttctttgccagtgtttcaagaggccgaggcaggaggaccacttgagactaggagtttcagaccagcctgagcaacatagtgagactcctatcgctccaaaaagaaaaaaaaagttaattagctgagtgtagtggtgcacacctgtagtcccagctacgtgggaggcttaggctggaggatcgtttgagcctgggagttcgaggctgtagtgagctatagctataattgcaccactgcactacagcttgggcaacagtgagcccccatctcaacaaaaacaaaactaaaacaaaacaaaaaactcaacttctcgtagtgggaaaaaagcactttaaagaaatctgggttaataattttgacagtggggatgactgtgattgaagtcacacacctattacgttgggctgtgacgaatgacacttcagtgtgcatcagaatgtggggatgcttgtcaacaacgcagacttctgggcccctggagattccaactaaggcggtctgggggagagctcagcactctgactgacaggcaggagagctgagagcgaggcaagcctgggtcagatggtgaccgctctagctgtaaaaagataacatacacagcctcaggcaaagaccacacttttagcttcagtttcccagataatactattatgaaaagaaagtcttttattccagtcagaattgtgtgtgagacaatgaatatacatggtcccttatttgaaccaatctagcagctcagcgcataataggtgaatgaatgctaatgcatggacggtgactcgcgcctgtaatcccagcattttgggaggccaaggcgggtggattactcgaggccaggagttccagaccagcctggtcaacatggcgataccccgtctctactaaaaatacaaaaatagaattagtcaggtgtggtggtggcacgcacctgtaatcccagatactggagtggctgaggcacgagaatcgcttgaacctgggaggcagagattgcagagagctgagatcatgccactgcactccaccctggacaacaaagtgagactttgtttcaaaataaataaatacataaaataaaaagactgctaatgaaggtaaaaatcaaatggcttaatcaatcaatccctcacttcatcctgacttttcaaccctgagttaaatggttctgtatttaaggctaaataactttaaacatttacatggtgctaaaatttctgttataatatatttctgccaaccttaaagtttagagtatggccttgaattctgtgactaaagattagaatctgatggaacaaaatcagtttttaagctattttgtaccatcttcaccacaggtgggaaaactgtgaagttaacacaactttggaatggaagttgcttcctagcaattcatatggaaagatgttaaatgtttaacatgaatttcaagttcctttacttttcactggcaacctgaacttgaacaagagaaccaaaatggtttaggtttgacctttaggagggtgagctgttgggacaagtataatcccactctctactgtctgaaaggcttagtaaaatgacagacgaatgaacacactggaatttgatatcacgttgttaatcaggggagaattttttttttgagatggagtctcgctctgtcacctaggctggagtgcagtggcacggtctcggctcactgcactcctgagttcaagcaattctcctgcctcagcctcctgagtagctgagattacaggcacccgccaccacaccaagttaatttttgtatttttagtagagatgtggtttcaccatgttggccaggctggtctcgaagtcctgacctcaggtgatccacctgcctcggcctcccaaagtgctgggattacaggtgtgagccaccgtgccctgccaggggagaatgtgttttgattgtctcctcttcaccctgttggtgagggagggattccatcttagggttacagggatggccaaacacatgacactcaacacttaacagatgagatcgacaggaatttatgagtcatgtatactcagtccaggaggggaggacactgcgcgtcatgcagggccacatggaggttgcacttaggagcagagcaaacaacaaggggctgtcagacaggctttatggtattaagcaagtggggtgcctcctggttgtcaggatgtgattggcttgtttgagttaagtccatggaatcaggggaaatgaagcccattacaaaaagagaacaaggactgtgcgtggtccccttggtaaggggcgttgtttggctaggggactttggccatgggagcagagtgggaaggagacttgtggttaggccattcaagaccttcccagttcttttttttttttttttttttttttttgagacagagtctcactctgtcgcccaggctggggtgcagtggctcaatctcggctcactgcaacctctgcctcccaagttcaagccattctcctgccgcagcctcctgtgtagctgggattacagatgcccgccaccacgcctggctaagttttgtatttttagtaaagatggggtttcaccatgttaacctatcctctaactggtctctaactcctgacctcaggtgatccacccacattggcctcccaaagtgctgggattacaggtgtgagcccttcccagttctaccaatgtcaaggcagcacataaattgagtctcaatgttaggtcttatacaacagttcacccctagatgccatggcataaatttaaaccttaatgatggctgagacttctagggaatagaagtgccccactaagaagcaaggaaggcacttgaccaggagggagagggccacatggtgagatggtcatcaaaaacaggaactttagaggtgtccccctgatggccagtaaaggcagttgaggaacccgtgtggcattggtgtagggagtacatgtccccagaggttgtggatttagattcattaaggcctgtggcaatagtgacacccagtaacttacataggagtttcttgaagatttcattatgcctctcaatcgaacctgctgcctgatatgagaggggaggtggaagtttcattgaatggcttaagagcctggcattgtatgttcttagaagagaaatgagtgtcttgctcactgtcagtaataagtgggactccaaaggagactggaaatgttctgctgaagccttgtatggtggccttgctgtacatagagacatctgtttctttatttatagtttgggtgtatttgaggcaagagattctgagagttctttaccacaaagggtgcaactcttaggcaatggtccaaaaatttataaaaactgtgcagatggggcgatttgttggccaggacatccagcaataagatgactgcctgaagtctggccagttttgctaatcttgggtccttcctttatcagggatatcctggttaagggatggaaagcagcaactgtctgctgagcttcatcgtgtatgatgggggtgatgtcatctgtaaagtctacaaattcccattgctcttcactcagttgctttgaaggggctccccagataacctaggagtctgcaagaggggtgactttttccagcactatgggctctggtgagggatgggggaagccaccccttcctgcagatggaacatgccagagtgcccgggtttagctccatcctgtatcaaggaggccttggtaaccatgcggagcttccaggattttgcttccatgacccaaggcataatggacagcgcagtatggagggtcacagctagtgtttaatgacagcctctatttccaagagagcccagtatgcagctagcagttgctgctctaataatgtgtagaacagggcctgggagggcagtttcttgcatcaaaagcctgtggacaactttcagctatcgtgggtggtccagagacttcaggaggaatgagaggaggttgctgaagctccagaaatctctgggggtcctagtgggactgcctgttgtagacttttattggaggggcccaaatttacattgagctgacttgcaagtactggcatcaatgagattaaatttgtaaatgagaaatatgttgccaccagaacccaaaaaagagctaaaaatatactagacttgtattcacattgtgggtgcagagagggtcaatagctatttattgacagtgtctgggtgggagcagcccttagtttaccaagtaatttttaggaatttcaccaaggtggcagggccttgcgctatgtgtggggcagtggcccatctctttccgtgagcattgttgtgagtactgtattccgtggcctgcatgaaaatgtcaagtgagaatgtcctcagaggaggatctcatccatgtaatgtcatcacactcatgagactgagaaagtaggatgcagttagatcttgcctgcaaagcctgtgtgtgatgaccaggctcttgaaatgccccatgggtgccttgtaaagatatatcatgtccgtttgcagatgaaggcaaactttgattgagagactattgagatagtcactgaacagaacatattaggcaaatctgtaatagcaaaatattttctagtcactaattggatggagtcagtgttttccaatcatattaggcatggggtatggaagccttaagggatgagaccacagcagtaaaagtgtagtaatctggctagatgcagtggctcacacctgtaatcccagcactttgcgaggccgaggtgggcagatcacttgaggtcaggagctcaaaaccagccgggacaacatggtgaaaccctgtctctactaaaaatacaaaaattagccgggcgtggtggtgggcacctgtaatcctagcttcttgggagtctagggtaggagaatcactcaaacctgggaaatggaggttgcagtgagctgagatcgcaccactgcactccagcctgggtgacagaataagactccgtctcaaaaaataaataaataaaataaaattgtagtaatccactgtgaagcatctttttttttttttttttttttttttggaacaggacgttgctctgtcactcagggctggggtgcggtggtgtgatcatgggtcactgcagccttgacctctgggagccaagtgatcctcccacctcagcctcccaaatagctgggacgataggcatgtgacaccatgcccagctaatttttaaactttttgtagagatagggtcttactgtgttgcctgggctgattttgaactctgggccctcaagcaaccctcccatcttggcctcccaaagtgctgggattacaggtgtgagccaccacacccaacctgtcttctcctttgtgtccaggtttctttttgtctttctttcattccctttttatggtcactggatatacttttggcaggggcagtcttctctactctgctcatattgataaatttcttcccccagagaacctcaaatcagtatcatcaggggtggggccttccctgtggcagtggttgctctcatatagtttaaaaactgtgggcttgtgtcagggtgaattaacccttttactgtgccccggggctactaggagttttccctacaactctgaggatcaggatctttgctgcaacaggggcataagctgcagcgtggtccagcccaatggaagagtgctggcctataacccagaggtggagggactctgctacaactttgtcttttctgccatgagggttttccttaattaattaactaatttgtttatggattttttcctgtcttgtacaaatgccctcagaatattttggatttctagccacataaagttgtggctttcagtttttgtctccatatgtcccaagggaccttctgggaggttacgagcaaagtgttgggagccaggtggcccccgtcgcaggcagccacctcttcctccagggaataccagtcggtctcgctggggatggggtcctcatccagccaggtggttttgtctgtggcccaagtggggacattaaacccactatggcaagatgagctctttggcgtgttggaagcagcagtgctaagcacagctgggtgcgctcgccaggggctctgtgccgagagagcagttgagtaccaaatgctttttcccgttttctttcttcattagcacctgggccacagactgccatggctgtgtacctcgatgcccctgggggtcaggagaacacatgggcagcagcaagggaagcagcagctgaggggacgggcagggtcactgcccttgccttagcagcaaccagggcaccagggaaactcccctggggaactccctggtctctctccttcctttctgcaaacctctgtctgcaaaggaccgcccccgtggctgacctggggatgcacttcacaaacagtgtctgtacagctgccccaagtggccagtgatggtcaccaagctagttgtattgctaagagagcttgcacctgtcccttgataagtgggacttaagcagcaaccggttagggggatgtgctaccaccgtctttacagatgggagcctcaagagaccacctgccaaacacaggcccaaactgacagctctggggtccagtcagttcacaacagttttcatcttgggatgagatagcaaacaatcaacaaagacaacacagcatttcataggccagagtgcaaatcttccagtaattgtcaattctatcccaggcagcctgcgtggtattagtgaagttggttagccgagagcagttaatgaaatctgaccaaatgtccttgattgtggttgggtcatcctgttcattatgccaggtgtttcttttcttttatttttcttgcctttttttttatttttttatttttggagacagggtctcactctgtcccccaggctggagtgcagtggcatgatcgatcagagctcactgcagccttgaactcctgtgctcaagtgatcctcctctctcagcctcccaagtagctgggactacaggcacacaccaccatgcctggctaatttttaagttttttgagactgggtctcactgggttgcccaggctgctcttaaactcctgcctcaagtgctcctcctgcctcagcctcctgaatagctgtcattacaggcgtgagccaccactcctggctatcatgccagttgttttgatcaccttctcctcacccctgctctaggattatggggatggacaaacacacacatccaacactggagagacaagatcagcagcagtttatgagtcacatatatgcacagcccaggggaggaggacactgcccatcacacagagccacgcagggggacacagatgttgtacttgagagcagagcaaaaaaccatgggctgtgtgagacaaacattgtggcatcaaaagggtaggctgccttctggttcccatgtgagttcgtgatcagcctgtttgaataattccacatgttggtaggaaactgaaacccactacccaaaaaataagcagggggcagtcacagtggctcacactagtaatcccaacactttgggaggccaaggcaggagaatcacttgaggccaggagttcaaaaccagcatggacaacacagtgaggccctatatcttacttagcttggtgtggtggcacatgcctatcttcccagatacttgggaggctgaggtgggaggatcgcatgagcctaggagttccaagttactgtgagatgcactccagcctggatgacagagtgagaccctctgtctcttatttttatttttttgagacggagttttgctcttgttctccaggctggagtgcaatggcgtggtctcagctcactgcaaactttgtctcctgagttcaagtgattctcctgcctcagcctccagagtagctaggattacaggcatgcgctaccactcttggctaattttgtatttttagtagagacgggggtttctccatgttggtcaggctggtcccaagctcccaacctcaggtgatccgcctgcccctgtctcttattttaaaaaaataaataaaaaataagcaggaattgtgcctaatctcttgataagcagcattgtttagctgggggatcttatccttaagagcagagtttggagaggaatttgtagtccagctcttctgattttaccagatgccaaggcagcatgtgacactgaaccttaattttaggtcttacaccacggagtgtgtgctttttaaaatcacactttgtttctttctttctttctttttttttttcctagctgaagaatgtgatacaattactttgaactgcccacgaaattcagatatgaaaaatcaggtaagaataatttcaactatattttacccttaggtacatgataatccacctaaaattttttgagatttatagagttttacaaataaaaaatgaaaaacaggatttctagatcataaacagggtttgcaaatggtctctaagcatcccagtaaggtagcatatctttagaacttttttacttctaataaatattatagctttcattcattctttgaaatactcttctacatgccaacaacagaaaatcaatgcaggtgagttagaaaggagagttgttttctttctaatgcagttggcactctgtggatgagcaaattctttaaggcacaacaaaactagatactctaatataatacttgtaatgctttattaaactttaatttttttagatatcagaagtcaaactttaacatattatttctattatctttttccaaaaaggaaatatgtttattgtgttatgattataaaagaattcatattttttaattgtaaatttttttatttatttattttatttttttttttagtatttattgatcattcttgggtgtttcacagagagggggatttggcagggtcataggacaatagtggagggaaggtcagcagataaacaagtgaacaaaggtctctggttttcctaggcagaggaccctgccgccttcagcagtgtttgtgtccctgggtacttgagattagggagtggtgatgactcttaaggagcatgctgccttcaagcatctgtttaacaaagcacatcttgcaccacccttaatccaattaaccctgcgtggacacagcacatgtttcagagagcacagggttgggggcaaagttatagattaacagcatcccaaggcagaagaatttttcttggtacagaacaaaatggagtctcctatgtctacttctttccacacagacacagtaataatctgatctctctttcttttccccacacttcacccctttctattcgacaaaaccgccatcgtcatcatggcctgttctcaatgagctgttgggtacacctcccagacggggtggcggccgggcagaggggctcctcacttctcagacggggcggccagtcagagacactcctcagttcccagaaggggtcgctgccgggtagaggcgctccccacatcccagacatgggcggtcgggcggagacgctcctcacttcccagacggggtggcggccaggcagaggggctcctcacatcccagacgctgggcggccgggcagaggcgctcctcacttcccagacggggtggcggctgggcagaggctgcaatctcggcactttgggaggccaaggcaggcggctgggaggtggaggttgtagggagcggagatcacgccactgcactccagcctgggcaacattgagcactgagtgaaccagactccgtctgcaatcccggcgcctcgggaggccaaggctggcagatcactcgcggtcaggagctggagacatgcccggccaacacggcgaaaccccgtctccaccaaaaaaatacgaaaaccagtcaggcgttgcgacgcgcgcctgcaatcccaggcactcggcaggctgaggcaggagaatcaggcagggaggttgcagtgagccgagatggcgtcggtacagtccagcctcggctgggcatcagagggagaccgtgcaaaggggagaggcggcagtacagtccagcctcggctcggcatcagagggagactgtgcagagggagagggagagggagcgggagcgggagcgggagagggagagattttttttttttttttttgaggcagtctcactctggagtgcagtggtgcgatctcggctcactgtaacctctgcctcctgggttcaagagattctcatgcctcagcctcctgagtagctgagatcacaggtgtgcgccaccatgcccggctactttatttatttatttatttttttagatggagtctcactctgtcacccaggctggagtgcagtggtgcgatctcggctcactgcaagctccacctcccaggttcacgccattctcctgcctcagtctcccgagtagctgggactacaggcacccgccaccatgacccgctaattttttttttttttttgaatttttagtagagatggggttttgccatgttggccaggctagtctcgaactcttggcctcaagtgatctgtccacctaggcctcccaaagtgctggtattacaggcttgagccactgcacctggccagaatgttcattattttaaagttcaagttgtgcaaaaaagtacacacagaaagttaagaattgcctgtcattccactgttccaccttttgatatacatctttctggggacttccttggtcagttacttcttgtactgtccaagccacctctgttctctctcccaaagctcattagcagagttgcttaactatatttacagcattcagtatctcaaaggcatgttttgcctcaaataggctgattcaattctgctccttctatatataacatcaagttaatttgtaacaagttttgcctagtcttgctttaaaacatcactctgtaataaagtctttaatagtaacattgttgggtagtcaaatcacctatgtaagaaagagaagttacacaatagttgataaaataagcagtttaaattaaaacacataactgtcttgaaaatggtcagtggtgctagttttaactttgttttggggaattttcaaccattaattgtgaatatcagacttcactctttactcctgatactcaacattttccttgaaattataatctaataatgggcttctgtgcttactgaatttaaactagtttagtaaactgaaagtataaatttgttcttctcataatcctaatttttaaacaaaattttgctcctcacatttttttggtaacatgtagacttccttgaagataaaagaatgctaagtttttcatgtagtttacttttagggattttccaaaaccacttaagatgaggtacagaatatatgttagcacactgttcagcatttttcctaatttcagtgttataattttggctatatcaagtaaatactatcctaaaaggtgaaaatatatttatcaactaaaaaaataggggaaatacctctttgagatttttaaagttctattttaaaacaaaatgtcttcttctcctataaaaagtagtactataggcagctggctgcttccgttgactatttctttgtataatctataggatttgttttaactgctagatactcagaaggattctttgaaatgaacttggcagttagaacaaagaaaattcaccagggagaaacgtttaaaagaagaaaacaacacacactccattctatagttcagacattaaaagcaagctggaggccgagctcggtggctcacgcctataatcccaacactttgtggggctgaggcaggtggatcacgaggtcaggagtttaagaccagcctggccaagatggtgaaaccccgtctctactaaaactacaataattagcagggtgcagtggcaggcgcctgtaatcccaactacttgggaggctgaggcaggagaattgcttgaaccagcaggtggaggttgcagtgagctgagattgtgccactgcactccatcctaggtgacagagtgagaccctgtcttaaaataaataaataaataaaataaaagcaagctggaagtatgttctttagaataattattatctgcctttttagtgatttttataatttaagactaaaatctgcttctactaaggattaatttgagcttcctttttcgagtgatgccgaggaaaaacatcatagtgtcctagtgtcaaaaattaaagtctaagccaggcatgcttgtggtcccagctactcaggaggctgaggtgggaggatcgcttgagaactggagtttgaggctagtctggcaacatagcaagacctgtctcttaaacaaaacaaaacattaaggtctgacatttcaagtgcaatttcagaaagaaccctttacttttagttatttaaaatcaataccccatctactagaactattcaacttctacaacttattacaactggtatttattgaggatatactctaagaccaatctgaactgggtattcttggacataaaaaatacaggaggaggaggtggaagttaagaccccaggcagggccgggcgcggtggctcacgcctgtaatcccagcactttgggaggccgaggcgggtggatcatgaggtcaggagatcgagaccatcctggctaacaaggtgaaaccccgtctctactaaaaatacaaaaaattagccgggcgcggtggcgggcgcctgtagtcccagctactcgggaggctgaggcaggagaatggcgtgaacccgggaagcggagcttgcagtgagccgagattgcgccactgcagtccgcagtccgacctgggcgacagagcgagactccgtctcaaaaaaaaaaaaaaaaaaaaaaaaagaccccaggcagaccttatagacttgttggagaggcagtgcacacagtttgattctcggatgtgtgtaaggctcagatgtgtaaacaatttccatgatactttaaggaaaacatttcctaggacctttatcaatcaataaagttttaattactttaacgacatgcataagcatatggcaaatgaagataaagcaaaaatttgttccagctgggtacggaggctcacacctgtaatcccagcactttgggaggccaaggtcagcaaaacctgaactctacaaaaaatacaaaaattaaccacacctgtggtcccatggtcccagctgctcaggaggctgaggtgagaggatcgcttaaacctgggaagcagaggttgcagggaatggaaatcgtgccactgcactccagcctgggagacagagccagaccctgccaccaaaagaaaaaaaaaaaaaattgggttccagtttgtagccaagaatccatgccaagaggagtctaaggtaatacaataaaaataagaaaaataataaatattaggatactaagttggagttagaagttatgaaaataatgacattgtcttctatgttgtttatttggattacaaaacaagtttttttagttttagaaactacattaagaaactgcagaccaactcggtggctcatgcctgtaatcccagcactttgggaggccgaagtgggcagatcacctgagatcaggaattctagaccagcctggccaacacagtgaaaccccgtccctactaaaaatacaaaaattagctgggcatggtggtgggtgcctgtaatcccagctatctgggaggctaaggcaggagaattgcttgaactcaggagaggaaggttccagtgagccgagatcgtgctcagcttgagcctgggaggctgtggctgcagtgagctgtgactgtgctgctgcactccagcatggatgacagagcaagactctcaaaaaaaaaaaaagaaagaaagaaagaaagaaactacaataccattaagttattggctcatttacttgcgacaaatgtatcccactaatgtaagatgttcataataacagaaactggggataggatatatatataggaattctttacactgtcttctcaaattttctgtaaatctaaaatgattctaaaataaaagcgttactttaaaaagcatactaaataaaatttagattctagatcaatgaaagcgcatcgcccattccaccactcgaatacaattatttttgtcacttcgttgtattcctttgtacatttttgtatgcataattataaaaacagcaaataaccctgggcgcggtggctcatgcctgtaatcccagcactttggggggggccgaggcaggtggaccacctgaggttaggagtttgagatcagcctggccaacatggggaaacagaaaccctgtctctactaaaaatacaagcgattctcccgcctcagccccagagcagctgggatcacaggcacccaccaccacacccagataatttttgtacttttagtagagacggggtttcaccatgttggccaggctggtctcgaactcctgacctcaggtgatccacccacctcagtctcccaaagtgttgggattacaggcgtgagtcaccgcatccagcctaactcatatagttttcaaaatgaccttatgcaggacgtaccattattatgctcactttacacatcaagatccagagtggttaaaaaataaaataaaataaatataaaaattagccaggcgtggtggtgggtgcctgttatcccagctactctggaggctgaggcaggataattgcttgaacccaggaggcagaggttgtggtaagccgatatcgcaccactgcactccagcctaggcgacagagtgagactccatctcaaaaatcaaaaacaaacaaacaaaaaaaaacaaaaaaaaaaaccctgcaaataatttgatattgttctatatcctgcttttgttgtttaataattcagaaacattttatccagtttgctccatgattttgccatcctgttgctccatggtcatgatgatgtcatggtcaatggcagcacggtatgcccatctgacacagaaatagattctaggatgcgagtctgagggccggagccagaaccctcccagtagatggaatgatatagcccaagcttgtccaacccatggcctgcaggccttatgtggcccaggacagcttagaacacagcccaacacaaatctgtaaatgttcttaaaacattatgaatttttttgctttttttttttgagatggaatcttgctctgtctcccaggctggagtgcggtggtgtgatctcagctcactgcaacctctgccacctgggttcaagcaattttcctggctcggcctccctggtagctgggattataggtgcacgccaccacacccagctaaactttttggatttttagtagagacggggttttgccatgttggccaggctgatcttgaactcctgacctcaagcgatccacccgcctcagcctcccaaagtgttaggattataggcgtgagccactgtgcctggcctttttgtgatttttttaaagctcttcagctatcatcagcattagtatattttacgtgtggcccaagacaattcttcttcttccaatgtggcccagggaagcccaaatattggacacccctggtatagacagaggatctgaggggagattctgtgacagagtgaacttggcctgagagagcttaggtgatgaggctggaaggtaagttgagaccagggccccagagccttgaatgccggagaggggtgggtggtggaaggtattggggattttcagtgattttctcatgaccttatctgggatcctaaggggacttgaaagaagatgagacaggcttaaaagcctgtgcctgggagatggatgctattgacaagatcaatagagaattcaggaagaagaccatcagatgtgtgtgtgttgttaggattgagttttctttgttggttggttcagaaagaggagataaaggtgtgtggagtttggggtatgtgagatttgttgtgccagtgagactgcttgtgtagatgacacagcactaggtactgtgcttaggattcatgcattgggaggttatagttgaagccctaggcatggatgagactgtcaaggaaaatcgtccttataggaaagcggagaggttaaccaagatgaaaccttgaggaacacttactcttggaggtcagaggaagaaaggagctcagaggtaactagaggaatagccagagaagaaaaccatctgtgctcaaggcaacgattctttccttcatagcactgatcctagttcatagtcacatgtttgctgactatttcattgtcttcacccattgattaggctatgccccttgagggcagggactcctgtgtctttttgctcataattgtatcttcaatgcctactacatagtaggtcccaataactgtgtattgaataaagaaagggaaaagccaggggagggcatcgcttcacatgtcgaggaaggaatggtcaccaccctcaggaggcacagcgtggtcaagagggagacctaccaagatgtcattggatttacttgcaagagttaagaagtgagtatgagaatgtttatgcagttctatccagaaattcattaaggtagcaaagaaaaatattaaaatgttatttgaaggtattggaaagtacagaaaaggcttcctttctacttttcaggatgagaaacttcaggattttagaaagaaaaaggatcagcaggagtggaggattaaaaataatagagagaagggggataatacatgggatgttttcctatagaaggtagaggggattcattttcttagcaaatatttattgataacatatgtttggtagaaaacacacagcactagattttcctcaaggaatctgtaagctggcaaggaagtcaagatatatgcacacataattttgataaataagagtcgtcaaaggcatagagagatgaatttgcattttaaaagtaaaaacctcagccaggcatggtgactcaggcctgtaatcccagcactttgggaggccgaggcaggagaattgcttgagaccaggagttcaagaccagcctgggcaataaagtgagaccccatctctattaaaaaaaaaaatgtctttctttcctttttttttttagatggagtctcactctgtcgcccaggctggagtgcagtggtgtgatctcagctcactgcaacttccacctcctgggttcaagcgatttacctgcctcagcccccgagtagctcgaactacaggcgtgcaccactgcacccggctaatttttgcatttttagtagagaccaccataggtctcaccatatcggccagactggtctctaactcctggcctcaggtgatctgccctcctcggcctcccaaagtgctgagattacaggcgtgagccactgcacccagccaaaactttctttttaattagctaggtgtggtggtgcacacttgtagtcccagctgcttgggaggctgaggcaggagaatcacttgagcctgggaggttgaggctgcagtgagccgtgattgtgctactgcactccagcatgggtgacagagcaagatcttgtcaaaaaaaaaaaaaaaaaaaaaagtaagaaccttaactctttttcagaggcaggactcaaagaaggttggatggggaaagatagaaatatactttttagatgcaaagtcaagaagttgagttagttgatgtgaaactggtgttgtgccttgaatcacggcatttggttgggacagttggttgggacaggagggaggaaatggagcagagttattagggggctaaagagtttgctctgttcatacagcagggaggcagagacctgcgtgaaataggcaatgctatgacagtatttgataaatgtgaaatagattgccagatggtagatggtgaaacatccattcatccctccatctttcaagtatttcagtgccaagaatgtattaccagcactcccttagggtctccagatacaatggtgaatacctagagcttacagtcaagtttggcattgaaaatctccaactgggaagggtgagtggaagtgtttgtggatgctccaatcacagaagctccgtaggcaagtacactaagaaaatccccctcttagagaagctcagcacatatccctaaaggcaaaagatagagaggacacctgatcgacaggtaagcttagttgaacagagaaatacttgtttttcccacccctggggcatacctgttaaatgtcccctgcatctcatgtttcctgtaaacactactttgggaagagttgttcaaatggaagtcttgaatgccaggatggaagagtgtgaacttgatgtcccacaccctggaaagttcccgaaagagtctgacggtggaatgatggggtaaaaaggcagagttctagaaaggtcatcctagcaggggatggtctaggggttagataggaagaaagactgaggccaggagagcctgagggctattgcagtcacctagggatgtaatcccaagggcctggatttgggttgtggcagggagaaggaagaggggagactgcagttctaaaatgttggtattggtgtattagggctgccataacaaagtgccacgaatgaagtgacttaaacttaccatcatctcatagctctggaggctacaacaaatctgaactcaaggtgtcggcagggttggttccttctttttttttttttttttttttgagacttgctctgtcacccaggccagagtgcaatggcgtgatctcagatctcagcccactgcgacctttgcctcctgggttcaagcgattctcccgcctcagccttctgagcagctgggatcacaggcacccaccatcatgcccagctaatttttgtatttttgtagagacggggtttcaccctgttggctaggctggtcttgaactcctgacctcaggtgatccgcccaccttgcgccctgcccagggtcggttccttctgagggctgtgagggaaggacctgctccaggcctctcttcatggcttgtagctggctggcttctccctgtgtttcttcacatagttttccctctttgtttgtctgtctgtgtccaaatttcccctttccataaggaagccagtcatattgagttagggcccaccccaatgacctcattttaacttgattacttctgtaaggaccccatttcaaaacacagtcacattccaaggtactgagggttaggattccaacatgggaattgtgtggagacacaggtcaatccacaacaatgtttgaaaacaaagcaaaacaagaaccttacaataataataacagcgcattttgagggagagatgaagatgatttggtgtctggcagactctgggacagaagtggagggaagggctgaaagtccatttcagagaaccccggtggtgaccagggctgtggtgggtgccactgttgaaaatagaaaaaccacttgtttgggcagtgggaaaagcaagtagagagtctgatcaacaaaaactgaagaccccatgtcattttatcctccgagggctgattgtctagttggtggattacctaatgctatcattttcccactccctgcaaatcatccgtagttgattcttttattattatttttaatacgctttacgtttttggagaatttttaggttcacagctgaattgagcaaaaggtgcacaaatttcccattcactccctgcccccactcatgcacagctccacccccattgtcagcatcctgcatcgtaacggtgcgtttgttatgattgatgaacctacgctgacacaccattatcatccaaagttcaaattggtttaaattagggttcacccttggtgttgtacattctataggtttggacaaacgtctgatgacatgtatccaccattctagtatcttacagaggagtttcgctgccctaaaaatcctctgagctccacccattcatctctccctcaccactaacttctgaccaacaactgacctttttactgtctccatacttttgccttttgcagaatgtcacatagttggaatcatatgctatgtaaccttttcagattggcttctttcccttagtaatatgaatttaagttttcttgctgtcttttcactgcttgatagttcatttctgtttagtgcttaataatattccactgtctgtatgtaccacagtctatttatctattcacctactgaaggatgtcttggttgcttccaagttttggcaattgtaaacaaagctgctgtaaacattcacgtgcagatttttgtgtggccataagttcagcccctttggataaatccaagaagcatgattgctggctcatacagcaagaggctgtttaggtttctaagatgccaccaaactgtcttccaaagtggctgtaccattttgcattcccacccagcaatggatgagagttcctgttgctccacatccttgtcagcatttggtattgtcagtgttctggattttagctattgtaataggtatgtagtggtatcttattgttgttttaatttgtatttctttgatgatatacgatgtagagcatcattttatagcttatttgccatttgtgtatcttctgtgatgaggtgtttgttaagggctttggctcattttaaaatcaggttatgttcttattgttgagtttaaagaggttttatatattttagataacagtcctttatctgatatgtcccttgcaaatattttcttccagtctgtgtcttttcttttcattcttttgacagtgtctttcacagagtagaaagctttaattttaatgaagtccagtttatcaattatttctttcttggattgtgcctttggtactatatctaaaaagtcattgtcatgcccaaggttaactagattgtctcctatgctatcttctaaaaattttataattttctatttacttctaggtctgtgacccattttgagttaatttttgtgagagtttaaagagtttaaattttgtgagagcttaaggtgtgtgtctagactaatttttttttgttattccagtaccatttgttgaaaaaactatctttccactattatattgcctttgctcctttgttaaaaatcaatagactatatttacgtggtcctatttctgggttctgtattctgtttcattcatctattttgcttttatttgtctcttgtttgccaataccacactgttttgattactgtagctttccagtaagtcttaaagttgggtagtatcagtctttcaactttgttcttttccttcactgttgtgttggctattctgggtctttttgtccctccatgtaaattttagaatcagtttgttgacattcacaaaataacttgctgggattatgattgggattgcatttaatctatagatcaatttggaagaactgataccttgacaacattgagccctcctatttatgatcatggaatatctctccatttacagggcatgcctctttttattgtgtgttatgttattgtattttgcagatattgcatttttttttttttacaaattgaaggtttgtggcaaccttgtgtcaagcgactcttgctgccatttttctaacagcatgtgttcactttgtgtctctgtgtcacaatttggtaattctcacaatattttggtatttgttatgatgatctgtgactcgtgatcttgatgttactattgtaattgttttggggcaccatgaactgcacccatataagacagtgaacttaactgataaatgtgtgtgttctgactgctccaatgactggccattcctctgtctccctcttcttgggccttcctattccctgagacacaacagtatcgaaactaggccaattgataaccctacaatgagctcttaagtgaggaagagttgcatgtttctcacttcaaatcaaaagctagaaataattaagtttagagaggaaggcatatcaaaagccaagataggctgaaagctaggtctctcatgctaaacagccaagttatgaatgcaaaagagaagtttttgaaggaaattaaaagggctactccagtgaacaaacaaatgataagaaagccattattcttatcttatacttatcttattgctgatatggagaatgttttagtggtctagataaaagatcaaactacccacaacattcccataagccaaagactaatccagagtaaggccctaaccctctttatttatatatatatattatatatatataaataatgtcatatataaatatatataaatgtatataaatataaaatatataaatataaatatatatttatatataatatatgtattatatatatgagatatatgagatatatatagaagaaagccctagatggcatcttcttccaggaaagaagtaaaagaaatattatatattatattataaatatgtaaatatatattttataatatgtaatataatatttatatattatatatatatattttttgagatggagtctcactctattgaccaggctggagtgcaatggcgcgatctccgctcactgcaacctccacctcctgggttcaagcgattctcctgactcagcctcctgagcagctaggattacaggcacccctcccgcccaccacacgtggctaatttttgtatttttagtagagacagggtttcaccatattggccaggctggtcttgaactcctgacctcaagtaatccacctgtctcggcctcccaaattgttgggaatacagatgtgagtcaccgcacccggcctcctaaccctctttaattctataaaggctgagagaattgaggaagctgcagaagaaaagtttgaagctagcataggttggttcatgagcttaaggaaagaagtcgaagtcatctccgtaacataaaagtgtgagataaagcagtaagtgctgatagagaagctgcagcaagtaatccagaagatgtagctaccatcattgatgaaactgatgaaggtagctatactaaacaacagatttccagtgtagacgaaacaacctttcactggaagaagacgccatctaggactttctttctttcttttttttttttttgaaaccgtgtctcattctgtcacccagactggagtgcaggggcaccatctcagctcactgcaacctccacctccggggttcaagtgattttcgtgcctccacctcccaagtagctgtgattacaggcatgcaccaccttgcccagctattttttgtatttttagtagagacagggtctcaccatgttggccagactggtctcaaactcctaacctcaagtgatcctcccgccttggcctcccaaagtgctgggattacaggtgtgagccactgtgcctggccatgagccaccaagcctggccatctaggactttcctagctagagaggagaagtcaattcctggattcaaactttacaggacaggctaactctcttgttaagggttaatccagccgatgaccttaagttgaagctaatgatcattgaccattccgaaaatcatagtgcccttggaataaggctaaatttactctgtctgtgctgtgctctataaataaaacaccaggcttggataacagcacatctgtttatagcatggtttactgaatattttaagcccactgttaagacctattgctcaataaaaaagattcctttcaacacattactgttcattgacgatgttcctggtcacccaagagctttgatggagatgtacaaggaaattaatgttgttttcttgcctgctaacacaatatccatagtgcagctgctatggtttgaatgtttgtcctccccaaaactcatgttgaaatttaatccccaaggtagtagttgggagaggtggagcctttaagaggtgattggttcgtgaaggctctgccatcatgaatggattaatctgttcgtggattaatgggcttatggattaatgagttatcgtgagaaaggaactgaaggcttcctaagaagaagttaccatattagcatgcccagttcctttgccatgagataccctgcactgcctcagtagagtccccaccggcaagaaggccctcaccagatgcagcccctcaacctgggacttctttgcccccagaactgtaagaaataaattccttttctttataagttgccacgtttcagatattctgttataagcaacagaaaatggactaatacagcaccccatggaccaagaaataattttgactttcaagtctaatttaagaaatacatttggtaagactaaaaatagtgattcctctgatggttctgtgaaaagtaagttgaaaaccttctggaaaggattcaccattctagatgctattaagaacattcatgattcatgagaggagatcaaaatatcaacatttacgggagtttggaagaagttgattccaacgctcatggatgacgttgagggattcaggatttcagtgggggaagtaactgcagatacagtagaaatagcaagagaattaaaattagaagtggtgcctgaagatggggctggatttctgcagtgtgatgataaaacttgaatggatcaatagttgcttcttatggatgagcaaagaaagtagtttcttgtgatggaatctgctcctggcaaaaatgctgtgaacgttgttgaaaagacaacaaagagtttagagtagtacataaatttagaatagtacataaacttagaatagtacataaacttagtacataaataatgcacgaagcaggggcagggcttgagagaattgacttcaatttggaaagagtatctactgtaggttagatgctctcaaacagcatcatacgctccggagaaatcttttgtgaaatgaagagtccattgatgtggcaaaccttattattgtatttttaaagaaattgccatttccaccctaatcttcagcaaccaccaccctgagcagtcagcagccatcagcatcaaggcaagaccctccatcagcagaaagactacaacttgctgaaggctcaggtgatcattagcattttttagcaataaaatatttttaagacgtacttttttagacataatactatttctagactacagtatagtgtaaatataactttttcgtgcactgggaaaccaaaaatttatgtgacctgctttattgctatatttgttttattaactatgttttattattattattattttattttatgtttagttaaatcatattaactaatatagtttacaaaatgaccctatgcaggatgtaccattattaggcccactttacacatcgagatccagagaggttaaataatttaaggtcatacagtactgagtactgattctcctgtcttgactctcccatcttttttttgaaatggagtttcacttttgttgcccagggtggagtgcagtggcacaatttcggctcactgcaacctccgcctgcagggttcaagcgattctcctgcctcagccttctgagtagctgggattacaggcatgcgccaccacgcctggctaatttttgtatttttagtagagacggggtttcgccctgttggtcagaggctggtcttgaactcctgacctcaggtgatccgcccaactcggtctcccaaagtgctgggattataggcgtgagccaccgcgcctgaccaactctacaatgttgattctatcaccatggtcactgcacaattacctgatatgggcagtgcactctaagctgaatttttgcacctgcccccagcagccaaccccacctcttcagtctgaaactgaacccacaataattctgagatatgcctgtagtttttatttctttcatcagagtttttatagttttcctcacatagatcatatatgtattttgttagatttcaacccaagtatttcatctcggagggagttaatatgttataaatggtattgtgttttagatgccaggatctacttcttcattgctgatatataggaaagcaattgacttatttgtattaatcttgtatcctgccactctgccataatcatttacttttttgatgactgtttcagattttctacatagacagtcacatcatctaagcaaagacagttttatttattctccactgtaacgtttatttacttttcttgtgttattgcattagctgggacataataaattcttttttttttttttttttttttttttttgagacagagtcttgctctgtcgcccaggctggagtgcagtggtgcaatctcagctcactgcaacctccgcctcccaggttcaagtgattcttctgcctcagcctcccgagtagctgggattacaggcatgtgccaccacgcccggctgatttttgcatttttagtagagatggggtttcactatgttgaccaggctggtcttgaacatctgaccttaggtgatctgcctgtcttggactcccaaagtgctgggattacaggcgtgagccaccgcacccagcccataatcaattctttattgactgtcctctacatctaaggatgagctaggcaggaaggaggagcacactacagcagggatctttgccactggccagtgtcacaggaggtagaaatggaggaagaagaagattaaattggtgactaataaacttttcaatatagttgtaagtcacatgacagtcttcataaatgtgcatgcccatatttgatgcctccaagagtcttgggaggtgagatattacctccacttcatagatgaagaaatgcagaatagttagaccatctgttcatgttccagaagaacgaaggtgggagcccaggttttctgtcttcaggctccccccttgcctgcctttgtgcctttcctttttctcagcagttccacccctgttggaaccaatcactgtgagcacccatacacaaagaatgctttcaggattggcaggtctaagtatcggagtgtcaattgtcggagagtgagaagtcgtgattcattattgatgtctgcagcgcatggcacttatactttgaaagacatagaaatgctttatatgaaaaatgcaagctccattttactctaagagaagagcgggccatcttcctgctgccattttttaaacaaagacacagaggtcttgagtccctaaggaccttctccttctcccctctgttacccagacctcctgtacagcccttggcctagctatgattgcttacgcccagtctgcctgtagttcagtatttttcaaactttagacgataacatagattagaaagtcataaggaggccgaggcaggtggatcacaaggtcaggagtttgagaccagcctgaccaacatggtgaaaccccgtctctactaaaaataaaaaaaatttagctggggatggtggcgcacacctgtaatcctagctactcaggaggctgaggcagaagaatcacttgaacgcaggaggtggaggttgcagtgagccgagatcgcaccactgcactctagcctgggtgacagagcaacactccatctcaagaaaaaaaaaagagaaagtcataaaagcttcttaagtcttgaccagcatttctaccaatgaaatgagtagtatacaatacaaaaaattagaaaatgtgtcaaaatgctgtgcatgaaatagaattatttttgtaaatttttggttttgagtatatattttttaaaaacacgtatatttatgcaaaatagtgttacatgtttcatttctgtaggttgtggtcaaaaagttgaaagagccctgcactagactgtgagttgcttaaggacagagaggctgtcctggtcctgtttggtcctcaatgtcatgcatgaagtgtgcacgcactgtaacgcatgtgaatatttagtgtccacatttgatcaggttgtcccaggtactgctcagagtgctgagatgtggtggtaaacaaaagacaagacctctgtcatcaggagctgacagccaatgggcgaggagggggcatagcagggcagggcaggtcaccagtgctggcaccagagcacctatagcgaaatctctgtgaccctgggcagtgcctcttcttttcttttctttcttccttccttcctctctctctctctctttccttccttccttcctccctccctccctctttctttctttctttctttctttctttctttctttctttcctttctttcctttctttcctttctttctttctttctttcttcttgatggagtctcactctgtcacccaggcttcagtgcagtgctgcaatctcggctcactgcaacctcctcctccaggttcaagcaattctcctgcctcagcatccccagtagctgagattacaggcacgtgccgccacgcctggctaattttgtgttattagtagagacagggttttgccatattggccaggctggtcacacatgtacctcttacccttcatttgcatgtcctcccgccatcctacccttcttagctgtttttggataatccctgagcctgctgcatcactttgcacatagaaagtgcttcaaacatcagccctgttaagcgggaggggtcagcaagcttcaagtggccaccctatgagtagcacattaggcagtaatgagaatccctaaggatagatttgaaaaaaacatggaaagtgcctattagttagtggcccaaagaaaacagatttaaattttgttactaacagtattagtacccatctatgatctgcttaaaccaatggttctggtcctcgactgcacattggaattacttggagaacttttttttttcttcttttttttttgagacagtttcactcttgttgcccaagctggagtgcaaaggcgcaatctcggctccctgcaacctccgcctcccaggttcaagtgattctcctgcctcagcctcctgagtagctgggattacacctgcgtgccaccatgcccggctaattttgtacttttagtagagacggggtttctccatattggtcaggctggtctcaaacttctgacctcaggtgatccgcctgccttgggctcccaaagtgctgggattacaggcatgagccaccgcgcctggcccactcggagagcttttatgaagtaccagtgcctgggcccctgccccagagattctggcttaagtggcctggggtagactccaagcattgatcttccttaaatgtcctagggctttcccagcacagccagagtgaggaaggctggcttagaccacgcatccacagggcagaggaatgcagacacgttcactgctgaactcttcatgtggtctgcatgtgggctgctcctcctggctgccatggaaggcctgctgggctgaagttgaattgggcagcctgggagggtctgatcctagagtcagccccaccatggcggtcagggcaggcccacaatgacagccccagctgctggggaagagcatgagagagcatattccctgactcccaaaaccctttccccatttctaatatattaactccccccaaaataaaagacttaggttgaaatataacaaaatacatatatgatctatgtgaggaaaactataaaaactctgatgaaagaaatcaaataactaactatagttgctccggtgccagcactggtgacctgccccgccctgctatgcaaatttcttaggccaaggaacgcacattgggaaatgccgtcttcacctaaccaatgtgcatttctgatacagagattgtgtagacttataggacattagaagtggaaggagctgtatcatttagttcagatttctttgcagatacaaaaacagaggcccagagatttcttctttttccttttcagaagcaactgacataaccatgtgtgtctagtctgcttgggctgccgtaactaagtaccacaaagtcggaggctcaaacaacagagatttatggtctcccagttctggaggctggaagtctgagatcaaggtgccagcagtgttggactctcctgagggctgtgagggagattctgttctatgcccctctcttagcttctggtggtttgctggcactttttggcattccttggcttgtagaagcatcatcgcaacctctgcctgttctccctgtgttcaggcctgtctccaaatgtcccgattttataaggacactggccatattggattttagagcccaccctaatgatctcatagtaacttgcttacctctgtagagaccctatgtccaaataagcttacattctgagatattgggtatcagaaccccaacatagggattttgcaggggacacaattcagtccataacagcacacaataatttggtgatgattatattgcagaatttgtctcgaaatctgatacttagtagacgtttattaaatggaatggatggatgaatacataagtcttagcatccagggtattgtgtgtttatctgtatcagaaaacatacaccttgatggtttccattctcctctgagcagaaggctggagttttccagaccagcctccactgtcatgaatcattttgctttattattcgttctggctatatcggttatacttacatcttttcctatgcattctcttttgttctacttcccatccgggatatggctgcatatgcttacctaccctttgctaaatcacaaagccttagctgtgataggtactcgttatttgtttaaaactgttaatagtaacagcaagctagggatacagaattctttctgttacatgattacttttctattataaaagtaataggcggctgggcgcggtggctcacgcctgtaatcctaacactttgggacgccaaggcaggtggattgcctgagctcaggagttcgagacctgcctggccaacatggcgaaaccccgtttctactaaaaatacaaaaattagccgggtgtagtggtgtgcgcctgtaatcccagctactggggaggctgaggcatgagaatcccttgaacccgggaggcggaggttgcagtgagccgagattacaccactgcactccagcctgggtgacagaacgagactctgtctccaaaaaaaaaaaaagtaataggcttattaaaagatgatgaatgatgagggcccagtgtggtggtgcaagtctgtagtcccagctacttgggtggcggtggctgaggacgaaggatcgcttaagcctaggcatatgatcgatataatcgtgccaccacactcccacctgggccacagaggaagactctgtctctaaaataataataataataaagaaaatgaaggaagtatgatcttctcttttttccctttgcatgggtataatttttttttgtatagttatagtcacactgtatagacaatggaatgtcttgctttcttcacttactacagtatcataaacattttgtataaagagttaatttgatgtgatcaaatgaataatcattattaattaaaaattttaaggccaagtgctgttctaaggacttcccttctccccccaaccccccctttttttttctttgagacagagtcttgctctgtggcccaggctggagtgcagtggtgcagtctcagctcactgcaacctccgtctcccaggttcaagcgattctcctgcctcagcctcccgagtagctgggattacaggcatctgccaccacacctagctaatttatgtagttttagtagagacggggtttcaccatgttggccaggttggtctcaaactccggaccttaggtgagccaccctcctcggcctcccaaagtgctgagattacaggcgtgagtcactgcatccagcctaactcatatagttttcaaaatgaccttatgcagaatgtaccattattatgctcactttacacatcgagatccagagtggttaaatatttgtttaaggtcatacagtactgagtactgatactactatcttgactctaccctctggattctatcaccatggccactgcacaattacctcatatgggcagtgcacgcccagctgaatttttgcgcctatccccagcagccaaccccagttcttcctctcccaggggtacacaatgcaagtcttgactctgctactcaatactgtatgactggaaacatgatgatagaatctactatcttgattctatcgccatggcctctggagctagatggaccttctcagtccctagctttgctactttgctgtgtcacctggagctggttcccaatccctctcagtcagctttctccttcgtaaaatggacatcttaatactgatctcctagcacacagtaagtgctcaataaatatctggttaacgttatatttacatgaaacaaactcagtggagtatttgtctgtcatccagttcaaagcttccttcctttcttttttttttctttggaaacagagtcttgctatgttgcccaggctggaatgcagtggcatgatcttggctcactgcaacctctgcctcccaggttcaaggaattctcctgctccagtctcctgagtagctgggactacaggtgcccaccaccatgtctggctaatgtttgtatttttagtagagatggggttttgccatgttgcccaggctggtcttgaactcctaacctcaagtgatctgcctgccttagcctcccaaagtgctgagattacaggcgtgagccaccacacctggctcagagtttctttcctcaccttcagctcaggcctgatctgaaatttggaggccttaaagttaggcggttggacctggctctctccctcctccccggagatgagaatttggccactgcacaattacctgatatgggcagtgcacttccagctgaatttttacacctccccccagcagccaaccccagctccttctctcccaggaatacaccttgcacctcttacctgagcaggtaagaggcctgcgtgctttccagaaggcactggtgcatgtgacccatggaaaacatgccccactgtgccatcatccagggcggctccagctagcatcttgcttcctcatgcccacaggttaggtcttccagtggcagaaaggttgggcctgtgagtacccacagtccacaagaatccagctggggagtgagaggctggtccccgcccctgctgataagcaccccctagtggtgatcttgacgccctcatcacttggcttggatggagcagagagcagccctgtttctccttatgagcagagggagggcagcagccccagctttcactccttccgtgaatttcttctaagaaatctctttctcttattgatatggtgtggctctgtgtccccacccaagtctcatctcaaactgtaatccccatgtgtcttaggagggagctggtgggaggtgattggatcacgggggtggttatccccatgctgttctcacgacagtgagtgagtttgcacgagatctgatggtttaaaagtgtgtggccgatcccccccctctctctctctttcttactgccatgtaagacgtgccctgcttctccttcaccttctaccatgactgtaagtttcttgaggcctcctcagccatgtggaactctgagtcaattaaacctcttttctttataaattacccagtctcaggcagttctttacagcagtgtgaaaatggactaatacacttctataagctgaaggtggggcttggggcaagggtcataccaccacatttgacccacccttagctggtcttggggtttaaacagcacctctctgtggaacatgtacacaccactgtcctcacttgggcccaatcaaaactcctatgacactaaagacatcccatctcacatcctcctataggatgtcccattacagtctccgccgtatagctacgtaagggtttctttatgtttattacgggacttggagattgtttcaactatttcactgttctaaatgctgcttcggtgaatgtcacgatgtgagtacttgccccccactcccgcataaggttgtatctttcctacaactaccctgatgtctgtatttgtagactagacctaaggctgattgccagttcgttcttccactaagcaacccagaggcactcaaagtcccttcctagtgataagtgccaccaaataaaagaaatgatgctgttttatctgttgaaagcctagcagtaactacagtcttgtgctgcataataaagtttactgtcaacaacagaccatgtgtacgccagtggtcccttgagattctttttttcttttttttttttttttttgagatggagtctcgctgtcacccaggctagaatgcagtgacattgtctcagctcacttcagcctccacctcccaggttcaagtgattctcctgcctcagcctcccaagtagctgggattacaggcgcgcaccaccgtgccaaggttaattattgtatttctagtagggatggggtttcgacacattggctgggttggtctctaactcctgaccttgtgatccacccgccttggcctcccaaagtggtgggattacaggcatgagccaccatgcctggccgagattctaataccatgtttttactgtgcctcttctgtgtttagatatgtatttaccattgtgttgcagttgcctacagtattcaagtcagtaacatgctgcacaggtttgtagcccaggagcaataggctttaccacccagcctaggtgtgtggtgggctacaccatccaggtttgtgtaagggcactctatgatgttcacacaacgaaatcacctaaggacgcatttctcagaccatatccccattgttaagggacacatgactgtaattgatttctttgatatctaacatgtctctcaaaaatttaagttctgcattatgttatacagaataaatggagaactatcttagttaatgattgatgctaaagtagccacccaatacatagtgactagttttatcttgtttcctcatcaaggaaacagaaatctatttccaaggatgcagagtttgtatctttttctttttctttttcttttcctttttgagacagagtctcgctctgttgcccaggctggagtgcagtggcgtgatcttggctcactgcaacctccatctcccgggttcaagcaattctcctgcctcagcctcctgagtagctgggactacaggcgtatgctaccacacctggctaactttttgtagtttttttagtagagacagggtttcacccccttagccaagatggtctcgatctcctgaccttgtgatctgcccgccttggcatcccaaagtactgggattacaggcatgagccaccgcgcccggcctagagtttgtatcttcagtgggacacgcccctttgtctttgacccctcacacaccgcctgcaccttccttttagagagctggattcctccttcctcctagcccccatgcatactctgtcattcagagaccagggccccatctattgtgctttatttcctaggcttggtgtcatccagaactagagcagggggatgactcggctttgctaatcttgacaatttagaaagagcctggggcctagctgcccagtttgacaacttggcatcttaaagccgaagggaaccttagaaatcacattgttcagcctccttgctttacagatgagggaacctgggacagtggatgagtagcagagttggcccggggcctggcccagcacccccgccagatgcccagcttgtctgagttggtagcagttgttaccacctgctgctgggcctcttgccttgcctaaatctagggagatttagacttttccacagttctgaatgatactcatctggcagaatggtgcagataaaagctactggaacaaaactgggagatggaagtgttgctcctttccttaaattggatggaaaggccgggtgtggtggctcacgcctgtaatcccagcactttgggaggccaaggcgggcagatcatgaggtcaggagttcgagagcagcttggccaatatggtgaaaccccatctctactaagaatacaaaaattagctgggcgtggtggcgggcgcctgtagtcccagctacttgggaggctgaagcagaagaatcgcttaaacccgtgaggcggaggttgcagtgagccgagattgtgccactgtactccagcctgggtgacagagcaaggctctgtcttaaaaaaaaaaaaatagtggatggagaggcagtgggcagaatcccatccaacaacttcattggcttggcagggcaaccagctcaccagactctctgcagacccgaagtcattacatacagtatgataacagggaatggacccgaccagcatttgctggagatgatatctggtgtcagcccgacaggcccctacctgcttctcttgatatgcaggaatcccttcaagctccaacaagatctgtttaatagactggagagtcctttagttccttcctctaagggaaaatcagatcgttctggtttgcttggtaactccttacttcatccctgatgggaagtttatagaatgaggaaccagggctattacatgaaactataaaactgcctagagcacatacttggtatttttaacattgttgagagggactcacttaattcagccttgcagctattgcattccagtccaaaccaacggcaggttctcaaaacaagcggtgaaagggttcctgttgcagagctgtctggacatttaaagaagggagaggaaatctcaaggggtcggttgcactggaatagaaatcgcctgttctttttttttgagacggagtctcgctctgtcacccaggctggagagcagttgcgcgatctttgctcactgcaacctctgcctcccgggttcacgccattctcctgcctcagcctcctgaatagctgggactacaggcgcccgccaccacgtctggctcatcttttgtatttttagtagagatggagtttcaccattttagccaggatggtctcgatctgctgaccttgtaatccgcccgcctcggcctcccaaagtacagggattataggcgtgagccaccgcgcccaggtgcctgttccttttttaagagtctcactctgtcgcccaggctggcgtgcagtggcgcgatctctgcttactgcagtctccgtctcctgagttcaaatcaagcgagaaatcacttgttctcttctgtgaacggaagcatcgcagatctctcttggcctcacactcctccatctccctgattcctctgttcttcatttacctaccttcccagcagtctgcagagctggccgctcactcacctctagtaaggggatggagggtcctgtgttggaataactcactgaccgctagaaagttaaaaataaatgggtaatgccaggagaacttggctggtgccttaaaagccatagaacttctctttccatctgtagataactgtagacaattttgtccaaaacagataatgatctgattctacctcccattggtatttcccttcctcggcctgtgacatctcactttctctagactgaactttatcccagactgtgaccttgccatgaccttcctcctgcgtgtgcctctgccaccacaggaatggccacgcctcagatcatgtcaccgctgggaacaaaccctctacctgcgactctgaagttccctctctgaccctcttttctttcttcccctcccccctccccctcactccctctgcacctgtgtttcgctgtcacgctcccaactcatccctgtagagctggtgaagagatgctgatgtagttcttgaccttgaaccccggccctgcagccgtcctgtggcctcactgacccagcgtcatgccctggtcaagcattttggtgatgctcttggtgattttcaatgggacctgccttgccaagcccggggcttaggtgaaccaggaccacctgcattctatgtttttgattgctggaaaaaaatcatgaaatgtcaactgttgttctcatttttcccactgccagttcctgctacccaacctccgccctcatttcaaggccttgagtactttttttctatagtgaagtctcccaaaaatgatattttttaaaaaaagaaaagccatagtactctgatttgatgtggtctgttaatacctatgggctttgacttgtttctgcttttagacctagacaaaataaaatatctgtggtaaaacatattcaagtttaccgggcacgggggctcacgcctgtaatcccagcactttgggaggctggggcaggcagatcacttgagcccaggagtttgagaccagcctgggcaacagggtgaaacaacatctctacaaaaatacaaaaaatacctgggcattgtggtgcatgcctgtagtcgcagctactcgggagactgaggtgggaggatggcttgagctctggaggcggaggtcatagtgagccaagatcatgccactgaactccagcctgggcaacagaggcagattctttctctctaaaaaacataaaataaaaaaaggccaggcgcagtggctcacacctgtaatcccagcactttgggaggctgaggggggcggacgaagaggtcaggagatagagaccatcctggccaacatggtgaaaccctgcctctactaaaaatacaaaaattagccgggtgtagtggtgcatgcctgtaatctcaactactcaggaggctgaggcaggaaaatcgcttgaacccaggaggcggaggctgcagtgagccaagatcgcaccactgcactccagcctgggtgacagagcaagactctgtcccccaccaaaaaaaaaaaaaaaaaaaatcaggccaaagggcaaaaatgcttgctttttagcacttagtagttatttccccaagaagagcgggagagaagtttattaataatgaaactggacagttctttatcagctctaattgtttgactcaatggcttctcttctcattaccatgcagtgctctgctggctgcaatgcctttgaacttcacaagaaggttagaatttcactgagacattcggatggtgtgggtgtcagggtgcagctctcacacatagttgagagtgtaaattgatacaactttatggaaaattaattgggagtacccattcacactcctgtctagcaatctcactttaaggacttgatcctacagaactcattacatggtgcaaggttcacagtgcggcattcaaaatagagaagagctgcgggtaactcccatgcccgttggcaggaactggttgaataaattatggtgcatcagtgctgtggggtatcattaaaccattaaaaagaagagagagtcctggccttaaaaaacttatctgatgtattgttaaacagataaagcaagttgtagatcaatatgatttggggctaaaaaaatatttctatataggtgtgaacatggccatgactaaggaatcaggaaggaagtacctagattgtaaccagtaacatgtggggagtgagatgggattgagagacgtaataatagattgagagaaaaagattttcccatctctttttgattttttaagaaaacagcatgattttcagtaatttttacttttgtgtgtttttggtattttttctttttctttttttttttttttttttgagacggagtttcactcttgttgcccaggctggaatgcgatggcccagtcccagctcactgcaaccttcacttcccaggttcaagagattctcctgtctcagcctcccgagtagctgggattacaggcccctgccattacgcccagctactttttgtatttttagtagagatgggtttcaccgtgttggttaggctggtttgaactcctgagctcaggcgatctgcctgcttcagcctcccaaaatgctgggattacagccgtgagccaccgcccccagccggtattttttcaaatcaaagaaaaaataatagagtaaatcatccaaaactttagatggtatttagactcagtaaacttttcatatatgacagatgaagccaaatggtctttctgtgcagtcagctagcacacaattgtgcacccgaggaaaattagagactgaaccggggtgtctgtggatgcatttcctcagcattcagccttccttttgcccgtgttctagcattacttctgtcctacagcctgggatttgtgaatgaaatagacaggtgcaaaaactccctgcctgtctgtaatatccatagccccgtgctctacttgtatttgcatgtacaaaccataatctcctgtaaaatactctgtgatatttctgaataataataaactctacatcctacacaaaggcaaaacccctgtatctttcatctttgaaaccatagcaaaggtatgaaattacacctgagcatgcctggcctcaaagtcctggaacggttatgtctttgaccctcacttcaactcaactccagaagaagcaggtcttccttgtaattggatagaaaactcattgtagagaagaaagatctacaggtcaagaaacccacaggtttgctgtaatccgagcaaagcactgtagcatttattttatattttcactcttcttatttagctcttttttttttttttttttttgagatggagtttcattcttgtcacccagcctggagcaatggtgccatctcggctcactgcaacctctgcctcccaggttcaagtgattctcctgcctcagcctcctgagtagctggggttacaggctcccaccgccacacccagccaattttttgtatttttagtagagacggggtttcaccatgttagccagactggtctcaaactcctggccttaggtgatccacccgcctcagcatcccaaagtgctgggattacaggcgcaccggccttagctcttttatccttaatgaaatgctcctcattccctgaggtctcacttgaattcttgcccacctctgggttgccttcctcttctgtctgtgctttgtaacacgtggttccttatgatgtcaatatttatgcatatgtcttcattccattactggattataatcttgaagcaacagatttttgtctctatatcccagagcctagaatggattcttacactgggcagtaagtacttaataaatgtatcccaaatcaaataaatacatttcttctttttcttttctttttttttttttttgagacagggtcccactctgtcacccaggctggagtgtaatgacatgatctcagcttactacagcctcaatctcctgggcttaagcaatcctcccacctcagcctcccacatagctaggactacaggcgctcaccacaacacctcatttttgtatattttttgtagagattgggggatctcactacgttgccccggctggttttgaacttctgggctcagacaatccacccaccttggcctcccaaactgttgagattacaggaatgagccaccattccctggccaaatacatttctaaaagccagtttctggagtatactgtcaaataatagatatatgtccacatttttatacggacttatattgtaagaaaaagtaaaaataagtgtgaagttattacagtaatagtaattattttgcagaaaaagaactgagtttaaacaggctttttagaaaaacccaacaggagattcacagtctggtactaacgtttagacatggatcatcagtaaatgtgttccaaagagttacacagataccagctttgtcttgggaattcttacccctgaaaattgattgactatcactgactgtgtgacatgagaaagttttgtggggttttttttttgtatttttttgagacgtagtcttgctctgtcacccaagctggagtccactggcgcgatcttggctcactacaacctctgccgcctggttcaagcgattctcctgcctcagcctccagaatagctgcgattacaggcacctgccaccatgcccggctaatttttgtatttttagtaaagacggggtttcatcgtgttggccaggatggtcttgaactcctgacctcaggtgatctgcccacctcagcctcccaaagtgctgggattacaggcatgagccaccgtgcccagcctgaaaaagttttgaacggtctaaatccatatgctgtgaatcctattaccatcacacacttaggcatttaaaatcatattttcaaggccaggtactgaaatattttctgcaagcagagagatcaaactttagcattgttattcttgtagtagtttcatagtttgaggtcttagatttaagtcttccattgattttgatttgatttttgtatatggagataggggtctagtttcattcttttgcatatggatatccagttttcccagcaccatttattgaagagactgtctttttcaccagtgtatgctcttggcaccttcgtcaaaaatgagttccctgtaggtgtgtgggtttgcttctggttctctattctgtcccattggtctaagtgtttggttttatgctactaccatgctggttggtatagctctgcagtataacttgaaagcaggtaatgtgattccaaagaagctagttaagtaattgagctaaactggaacctcaggtgtagaagtcataagcgtggggagcgtttcttctcaggttctctgcctataatttagtttgccacaccagatgaacagtgacaacttggtcttggtgttcgtggtggtttccaaccaaactttggtcataacaggtgaaccagcctggggcatgctttcccattcggttatcctccccatagtttgcaaagtagcaaagatgaactcttcatgagttggctaagcatagacatttcaagaccaaactaaacgtcctgaagagcatgtttcacattaaactagcccctaagggaccagtgggggctgtcagagaacaaggtttcaacgtactgagttttaaagatctaattggcttttaataacaattcatgaaccaggcaccatagtctacaaaatagacagggtttctgctgggcactgcaggacagttggtttttggaaggtggcttgagcaggaacaaggaaaaagcaccgtgccaagagtggattggttaacatcaggggacttcgggtgactttccttctatgggttaaagcaaaggggacttccctagcatgtcagctcaggttgactgggcccctttggattggttgctgtgaatctcctagttttttttgttttggtttggtttgggtcttttggggaaaacgggccagtttggagattcagctattatttctctctcctgatatcagaagatcagatcttatgagtacacagctgaggttttgggttggtgatgtggaaccctggtgtgagtgactccattttgggttggtctattggggtctcggtgcaggagctcagtccaaatcagtggcctctcctcatttttatttgacttctccatcaatctatccgtgtctcccgtcacatcagtccattcccccgtgggctgcacattcagctcggagctgagagcttttcccagggtgtgccctggggtttctgctgcttgcagcctgatattaaatctcaggtgtaaatcttcagaggcaactgttccttagtacccagagctttcagctccctgagcagaaatgggacttgactgtcagtttataaactaaccaaggtgtgaaattcatgcaacttagccgactttctgttcaaagaattcttggcagcagttaatacattttgcccaaatataagataattcccttgtactcacaatgagaaagttttacaaaatgggggttttctttagtttacttgaatataaaacataggtgttccactctgcagtaccttaacagttcttaaggagatgtttgaaacaacccatgtccaggcctcacacctcgccaattaaataaatgagaagttcttcccagccagtgttaagaaaaattaacatcaagttttaggaaggtagacagattatgcaaatgcatacctatatgatttaagttattacattaatttacacacacatttaaaatcatagattaatctaatttagagatgctgcattttttccatctctcctgtttcataaatgttattcacacggcatttctctgctatcctcggaatagtgtttgtatcgtgtcactctggcacggggctctacagaacatgtcgagcgtgttgccttccctactgcccacatcgtttgagagaacacattttaaacatttttttattgtggtaaaatacacataacataaaagttacgattttaaccttttttaactctgtcatccaggctggagtgcagtggcgagatcttggttcactgcaacctccgcctcctaggtccaagtgattctcctgcctcagccttccgagtagctgggattacaggtgcacaccaccacgcccggctaattttgtatttttagtagatgcggggtttcaccatgttagccaggttggtctcgaactcccgacctcaggtgatcagcccgcctcgcctccccagtgctgggattacaggcgtgcgccactgtgccgggcccattttaaccacttttaagtgcacagttcagtggcattaagtatattcgcggtgttgtgcgaccgtcaccaccattcacctccagaacttctctgtcttcccaaactgaaattctgtacccattgaacggtaactccccattccccatttctgcttcctaggccctgacatggaggctgggccaacggatatctcacctcccttcaggcttctccagatttgcccccgtttttctccctctttgtcccatctccaaagaaatggtgtcttttcatcatcaaggtccatcccttgctccttgaatacactccaggcccagtggaacaggcatcctgtggggtgcacggacagggtgcctggggaacacccagggcacagaacccagaccgggggtttggagaaggtgtcctagcagaagtgatgtctaagctgaggccctacagataagagaaagtaagcagatgaaagggctggggagggtggcatttcaggcctacacaaccacacgcgtgttcttcagccatctccatggcctcactgcccacctggtatcagccggccaccacccggctagaacggctttcaaaatcgctgctcgtctactcctcaccaaatcttgtcttcacttggtgctcagagcccatcacctttctgcaagtattttttttttttttttggagatggagtctcgctctgtcacccgggctggagtgcagtggttcaatgatagctcactgcaaccttgaactcctgggctcaagatcctcttgccacagcctcccaaagtgctgagattacaggcacaagccaccatgcgtggtccttgctgcaactttttttttttttttttttttttttttgagacagaatctcgctctgtcgctcaggctggagtgcagtggtgtgatctcggctcaatgcaacctccgcctcccgggttcaggtgattctcctgcctcaccctcctgagtagctaggaacacaggcgctcaccaccacatccagctaatttttgtgtttttagtagagccggggttttgccatgttggccaggcttctctcaaactcctgacctcgggcgattggcccgcctcggcctcccaaaatgctggaattacaggcatgagccaccgtgcctggccatttgctgcaacttttgacactgctccccctgcttttcttcccctctctgacctcctttctctgctgtcctttcgttccttcctctgccactgaagtgtccttctcaggtccttctcaaggttgtgaccttacagctgtctcttcacttccagtcatttctttcataatcactttgacatccttattttcatctcctgccctggcctctcccagggaccaggaccatgcattcagctcctgggggcatctcaagcttgttgtgtgtgagcctgcccttgttgtcttctccgtcacctcttcacagcttgctctgcatttcacctcctttcctgttttccccagtgatcgcatctctacagcggctctcacttcatccccttctctcctagaggagtgatgcggagtctcattaatccttgcttatgtcattcttcccccttctctgtccatcacctccacatgtcctgttcccccatgcgtcctacactgtagccaggtgggtatttcctgtgctggtcttagacaccccctgaggataccctgcttcaggcgagagcccctcagtgactccctgttgtccggaatgacgtccagctccttggacaggccccagtgtattcacctgtctcatctccttcttttcgttttgtttgtttttcttaacttccagcccgatttctgaatcatctccctcttgcccctcccattgcctttgcttaagactaaatgctccttcctcccaagtccccactgcccagatttcagcagggtccatctcaaacatgtctgtctccaagaaactgcctctgatttttttcataagaagacacctgtcctctctgacttcatctgtacccctctcttggaagtcactatcttgtgccttgcattttcgttgtttaagtggtctccatttcccagcatatcttgaggtcaagggttcaggtcattttatctttgtctatgcattgcaatatgggggtttttacatattagctgctcaataaatcggtgttgaataaaggcatgtgtatgctttcattaagactatgaaacccacaaaaatcagtggttttcctatttcacccttagaaaacaaacccacaacatagcacaacctgataatcagagctaagaacaaaggtcatgcatattaatctaaattctatctttatcaactttcacaagtaattcgtatttccctgtctgcatcacggggatgattctggccagacattgaccttggtaaaatttcctccagattatgagaaatcaagtcaaatatgccaagtaacatagtttctacttagagtcaggttcatgttttagcaggaacctcaaataccacaaaatctgtcaagttctaacatttgtatctctcgacagtacctgaagttcctgtttctgtttcctcagcccaggtttccaattcagtgagcagaacggtgactgtgttggtaaaagagcccacatacctgcccgatcctgcaggagtgttgcagatgcaaacaggcgggtctccacatgacctgcggagtaatgactagtgtccctaaagtcatggggcttctggggttagccttgaaaaaagctaaaggttgcatagagagagatttctatccgttcagagactcactataattctctctttctgtctctgtccttcatctgtttctctctttctctctcactctctctctgatacacacacacacacacacacactcacactcacacactcctgagtaagggaaatgtgagaagaaggtaaaacttcaactaaatgaaaagaaattgtatgaattatggtaagcaggttggtttttagttccagtaaagatagaaatatttagattacttaggagaaaagtctagctggtaacacatgggaatgtgcctgtgtgaaaacaaaacaaaacaaaaaatctaggcttgtggttaggtgaaggtatgtacactgctgagacatggcgatgggtgagcttgggatgaggagaaaggcttctctgagaagattaagagagaaagattgtttaaaaatgtttaaaacatgctgggcactgtggctcacacctgtaatcccaacactttgggaggccaaggtgggcggatcatgaggtcaggagttcgagaccatcccggccaacatggtgaaaccctgtctctgctaaaaatacaaaaattagccaggcgtggtggcgggtggctgtagtcccagctacttgggaggctgaggcaggagaatggcgtgaacccaggaggcggagatgcagtgagccgagattgtgccactgcactccagcctgggcgacagagcaagactccgtctcaaaaaaaacaaaaaaacaaaaaaaaaacacacattgacaccaggacggagttagcacatctttacaggtgagactctcagacccgagaaaatagaggcactttagagctgagctaatcccacagccacctcaacacacaaacggggaatctgagacccgcattggcaccgtgcctgaggttctaaagcccagggcttctgactcgcctcttgtgcttcttcagtactgtgggtgggggtggggtggggggtgacattagctgatgagaaagattttggttttagaaagatggagttaacataaacgaaggtgtactgggactggtctcctctgctgacttcatgggaagcacacacacgcacacacacacacacacacacacacacacacatacacacacctgtccaagatcagaaaaaatccctcacatccctgtagcatgatcctgattgtaaaaatggagccctaatcagaagggcagaagcatgattgcctctcaagagatttggacgccactttttcatagttggttttagctgctttgcgatatatactgaaataaatagaaaagggaaagaattgtaacctggattgacagacaacaagccctgacagacaaaaagcagataagaaataaaataaggaagataacccataatgtaaaataaaaatagcacattgttgcatgcattgatacccttttttttttttctttgagatcttgctctgtctttcaggccgaagtacagtgtctcaatcatagctcactgcagcctccagcttctgggctcaagcaatcttcccatctcagccacccaagtagctggggctgcaggcacgaactatggtgcccagctgataatttttaaaaatagggacattagtgcatttagcaaatttgagtgtctgctgtgtatcaagcactgttctgggcactgggacagcacagggagcaaataaacaaaagcccctgcgctcaaggtgctcgtattctagagggagatgctgagttcacctcccattaaaatgccattctcaagatccagtccctccacccaccccagcccccagggttttggtggaaatttaactaagttggaagattgataatatctccattcacatttggatatgattttaatgaaggttgctttttggtttttagggagaagaaaatggctttccagatagcactggagatcctcttccaggtaaatgattgattctaaagctatctgggctaatagctagtgtggctgaataaaagataatttgaggccagggtcggtgactcatgcctgtaattccagcactttgggaggccaaggtgggcggatcacctgaggtcaggagttcaagaccagcctggccaacatggtaaaaccccgtctctaccaaaaatacaaaaattagctggttgtggtgggcgcctgtaatcccagctactcggaggctgaggcaggagaatcgcttgaacccgggaggcggaggttgcagtgagccaagatcacaccactgcactccagcctggacaacagagcgaaactccatctcaaaaaattaaattaaataaaataaataatttgagactatgtttatcattaactttaaaatctgtactgcagaatagagcaactttctacctgcggtgcactgcagggaaagccgtatcttacaagacttcacaaaagccttcaaagagtattttctctgcactaaccttcctttgcatgtgaggggcacggcagggttctgaatggggcaggtttaggatcaggccagtcgggactgagtggattcttcttccctctgagttctaagagccatagcattggtggagaacatgctgtttgttgcttggtggaagggaccagaagccagctgggtcatctctctgtttgtgccttggccacttaggtagccaaaggagccctcctgacattaggtcaggtgttagtccctctccttttctgcttttagtgtgtttaagcaaataaacattaaagttcatttctccccgctccccttttttaatcataagacagacatgtttgcaatgtttaaatttctcattaatcagaagggatagggagtgagggagtaagcattaaaataagctagcaaatggccaggtgtggtggctcacacctgtaatcccaggactttgggaggccaaggtgggcagatcacttgaggccaggagttcaagaccagcatggccaacatggcaaaactccatctctactaaaaatacaaaaattagccaggcgtggtgatgggcacctataatctgagctactcgggaggctgaggcagagaattgcttgaacccgggaggcaaagattgcagtgagctgagactgcaccactgcattccagcctgggtgacagagcaagactccatctcaaaaaaatgctagcaaaataataataataataataataaaacatacctcaccaacattttctacatcttgtaaagcatacattgactgactgaagtcaccagagttttgtttctttctttcttaagcagggtggggaacccgtagagccctcaggggcagctatcatcagcccaggtaaccaagctgaaaaaccagaaggtgcagtgcgtactcaactttttccccttagaaacacgatattagaaaatacaccaataccaacatgtgagcaacagttctctctggaaggtgcagttctgggtgatttttttttcattccatagattttttttttcttgagacggagtttcgcactcttgttgcctaggctggagtgcaatggtgcgccaccacgcccggctaatttttgtatttttagtagagacggggtttcaccatgttggccaggctggtctcgaactcctgacctcaggtgatccacctgcttcggcctcctaaagtgctgggatgacaggtgtctcactatgttgcctaagcttttctcgaacccctgagctcaagcctcctcccacctcagccatccaaagtgctgggattacaggcatgagccaccacgcctggtgagtttttattttctttccactatcctatatttctaaaatttctaacatgagctggtatcagaactgcccctccgcatttaatctgtgtatacaaatgtatatataacaaatgatcacatgttggtaagtataccttgctgcatggtgaaataaccaaggaaacttctaaaaggttaactgtggttggcctgggtaatgggagcattaattttttccatatgctcatctgaattttcagatttgctatgacaagcacatatttattttctaattttaaaaatctatatttaaactctttaaagactaacaccctacacactaatgtggcacgttagctaaaataaaaataaatacagaaatttgtttagaaatatttgtaaacccttcaaggactcttctgaatgatagtcattattaattagcaggttaattttaatcaggcttctggtcatcttcaaacattttttacttgtgtcaaaatgaaccaccagagtgtgggtttttttgttattttttttgtttttttgagacagagtttcactcttgttgcccaggctggagtgcaatggcgagatctcggctcactgcaacctctgcctcctgggttcaagcagctctcctgcctcagcctcctcctgagtagctgggattacaggcgcccaccaccacacccagctaatttttgtatttttagtagagatgggttttgccatgttggccaggttggtcttgaactcctcacctcagacgatccacccacctcagcctcccaaagtgctgggactacagatgcacaccaccacacccggttaatttttgtatttttagtaaggacgggggttccccatgttggccaggctggtctcaaactcctgacctcaagtgattcacctgccttggcctcccaaagtgctggcattacaggcctccgccaccgcacccagcccaacctgggtccttttgtatgtgagagtttgcttgtttttttcacgtgctttctctactccagttttattctatgacaaaattgaggcccaacatgatttacttgcctggatccacccaacctgtcagttacttcccagtgctgctgccaacttaatgtctccttaaaaggatgctttagagaaaacgaaatcatgttgtttttcccctttggttaagagatcaaacgcccaccaaaagcccttgggtcagtttcttagtagataaaaataattcttcgtcactttctgaaagcggctaacatataacccttatgatgaataatgtggtgtgtgtgtgtgtgcgcgccccaaattccaatgagttatcaaagccagaaacttatattttaaatatgtttatttcccaaccacactggaaaccacacacagaaaaaaaaaaaagcatgattatacccccttaataaccgttactgcagaaggatgtgactctccttcaacacttgttggtattttacagcctccaaatctgacaatgtataaccacctgggatagagttattttatttcagaaccataatacttagctatctcggaagttgccaatataaaatgtttactctctaatggttttgaactaactcaagacctggttatcccggggagcatccttacaaatgatctgagagctaacagtcctcttgcagcagtggagggaaacactcccgtggcaatcactctccaaaagccagaatgtgcaagataaaagggcaccttccctgcagggaggcacattaagtcagtctgtgatctgctgccaacatcctgactggagccgtttctacgcctaactaatcatgacgtttgtgaattgtgaagcttgttgcaattcacaattaactgttaattgacccatattttataacccgccagccatgaacttacaagttagatacagacactaccagacattcactatttttttttacaattgttttaagtgacattaatgagcatgcttgattcctgaactcttctttacagtataattttaaaatatttgagtgggatacgatggagaggagggaggtgggggaagaaatgccccatggaaaacccactcatcaggttgagagtgtggagaagccctgtgtatctgagaactcttaatcatccacagacatggtatctctcaaagagaagtgggtgtaattccaaaatctaattttggcaggcgctcctgactaaatacttaatctggagatgtcttcaaggcaggcggaggttttcagtcctggctgcacattagaagtcccaggggagctttaaaaaattcccacgtcctccctgcatcccagactaattaatcgggatctccgagggtgggaccacacatcagggttttgtaaatttccctgggggtttggtggggttgggggtggaggcgtctatcctatggccaaggttgagaaccactgctttttaaaagactgtttgcttgtttttgagatggggtctcgctctgtcacccaggctggagtgcagtggcgcaatctcagctcactgcaacctctgcctcctgggctcaagcaattctcctgaaaaaggctgttggttattaatgcttccccacagctattctattcattgttgcatgcttcttacgtgtgctaggatgggagctttaaaggattacctcatttaatcctcacaaccaccttgtgagagaggtgtcattatccctgtttggagagtgagacaggggcttagcaagctcagtaacctgtccaagtcacacatctgcacggggttagctgctgctaaagctcatgccgttaatctccatggtacacggtgtcctctccatagcaatcttgcggctgccttgttaacaccaaaaaaacttgcatcagctggtttgacaatttctagataaagagctcttttcgggctgctaagaagcctaatttttcatttgattttcttcttgaactgtgtcacactcctcattcatttgatatattcatcaaatacttattgagcacctgctgtgtgcctggtgtgcagcagtgacaccagacatccaaagtccttttcctcttagagcttattctatctgggagagacagataataaacacaaaatcagtaagtcattttatatggtggtaggtgccttgaggaagatgagccaggttaatgggattaagcctggtagggggagggtgccactttagctcggaaagggtagcgagacccaaacaatgcaaaggacccggcccgtggagatctaagacaggaggatgccagggacaggaagttgctggggcaaagcccctgaggctggactgagctcagtgttctaggacgggcgtgggcagtgaggagcagcagaggaggtgagctgggagatagcctggggactctttcttctgcctccttcaaaaaataaaactagccaggtgtggtggctcacacctgtaatcccaacaatttgggaagctgatgtaggtggattgcttgagtccaggagttcgagaccagcctgggcaacatagtgagacccctcccccatttctaccaaaaaatcaaaaaattagctgggcccggtggcgtgcgcctgtggtcccagctactcaggaggctgaggtgggagcgttgtttgaacccgggaggtggaggctgcagtgaggcgtgattgtgccactgtactctagcctgggtgacagagtgagactctgtctctaaataaataagtaaatctagaacctaacatcttggagtgcagtggcaccaccatggctcactgcagcctcaatctcctgagctaatcgagcctccccttcagcctcctgagtagctgggactataggcgtgcaccaccatacctgaataatcaaaacctaacatctttaaagaacattggcataagacttggcaaaaatggcatcttgtccctcatctcatttagtccaagcgatacaggaaatgctgccacctccattttatagatgaggagtctgacgttcctagaggttcaatgccctgaaacgtcaagccttgaggaagttggagcactgggattcgaagagcaccatccaatacagacccagaatcaggatgatttgggattatgcttgtcaaggactcagggcagggctaccatacattaggcacaagaattttgatagtgataattactgtgttcattgtcacttcatcatgacagttaccgtgatgataagaaacctggcccttcttcacctgacaaaggctttcttcgtttgagccactgctcaaacgagactgaccaagaataaatcctcggggctttggcctttaaaataggaagtcatcataaatgacttgatgtggtgtgtttcattcttgctttgcaccagtggaaaatatacaggtcaagcatcaaaacatggcaaatggggaccccaattattagagaatctaagttaatttttatgtataattaattattcaacaaccctctcctctccaaaccaataattaatccatcttttgtattttaagaccaattctgtagtattttccatcaatatctatttactgctagcagatatcagctacattctttctcctttaatagaagttccctctttaggtattaagattcattaaacaacaataacaaatctaccttgcctcccagggacaatgcacagttctcattcatttgttcatttagcagataatttttgaatttccactgtacagcagccctgtgcttgtggttggcctgttatttgagaagcatcaaataataatctcattttttggctgggtgtgatagctcacgcctgtaatcccagcactttgggaggctgaggcgggtggatcacttgaggatgggcgttggagaccagcctggctaacatggtgaaacctcgtctctattaaaaatacaaaaattagccaggtgtggtggcagacacctgtaatcccagctactcgggagggtgaggcaggagaatcgcttgaacctgggaggcagaggttgcagtgagccgagatcgccccattgcactccagcctgggcaacaagagcgagactccgtctcaaaaaacaaaacaaaacaagacaaaaaaaaacccaacaaataaaataaataatcccatttttctccatttttgagaaagatttctttggtctgaagtctttctctcccctctccgaggcattacccagtttaacctttcatgtataatatatatgatagttatttaaagtatagcaggacaaaatgtatttgataggagaaaaccttgtttgctctgtgttaagtcctccagagagctaattagagtttgtgattctaaaaggcaactatagattcacttatattagcagttcatgtagattccagttaaggaaatggtttgtcacttgtgttattgaaaacacacacagggcgagcactgtggcccatgctggtaatcccagcgttttgggaggctgaggtgggcagatcacggggtcaggagtttgagatcagcctggccaacatggtgaaaacccgtctctactataaatacaaaaaattagctggcagtagtggcaggcgcctctaatctcagctactcgggaggctgaggtaggagaatcgcttgaacccaggagtcggaggttgcagtgagtcgagatcgcaccattgcactccagcttgggcaacaagggcaagactccgtctcaaaaaaaaagaaagaaaacacacacacaaaaaaactttagtagatctttcggcatattattttttaaaataaactgataatggttgatatgattgttcaaagaaataagagcttttcataaactcagtttaaagaaactttacaggccgggcgcggtggctcatgcccgtaatcctagcactttgggaggccaaggcgggtggatcacctgaggtcaagagttcgagaccagcctggccaacatggtaaaagcctgtctctattaaaaaatacaaaaattagccaggtgtgttggctggcgcctgtaatctcagcaactcaggaggctgaagcaggagaatcgctggaacctggtaggcagaggttgcagtgagacaaaatcgtgccattgcactccagccccagctgacaacagcgagactccatctcaaataaataaataaataaataaataaataaataaataaaggagctttacagaaaccttctgatgtttttttcttcttgacgataacattgccaacactgaatcttacaaagataagacaagaaagggaccttcagacaccattacatgtaattctggacttagtggtttaaatccttatttttctatgacattaaaaaaatgtatattttaggccaggcacagggctcacacctgtaatcccagcacttcgggaggccgaggcaggtggattgcttcagcccaggagttcaagagcagcctggggaacatagtgagacccctgtccctacagattttttttttttgtttgagatggagttttgctcatgttgcctaggctggagtgcagtggcacgatctcggttcactgcaacctctgcctcctgggttcaagcaattctcctgcctcagcctcccaagtagctgggattacaggcatgtgccaccacacccggctaattttgtatttttggcagagactgggtttctccatgttggtcaggctggtcttgaactcccaacctcaggtgatctgcctccctcagcctcccaaagtactgggattacaggcgtgagccaccttgcccagcctacaaaaagttttaaaaaattaaaaaattagttgggcatggaggtgcatgccagctactcgggaggctgaggcaggaggattgcttgagcccatgaagtggaggctgcagtgagccataattgcagcactgcactccagcctgggccatagagcaagaccctgtctcaaaaatatatatagtatccaaataaacacaataattacagaaaattgaaaagtgcccataagcaaaaaaaaaaaaaagaaaaaattaatcacctgcgttctcatcacccagaattaaccattgttaatatttttgttatagatccttccaaacttttctccatgcttgtgattgtatttattatacatgatttacagggatataaacgactgtattattagtcattagaagaactggattatggccgggcacggtggctcacacctgtaatctcagtactctgggaggctgaagtgagcagatcatgaggtcaggaaatcgagaccatcctggctaacagagtgaaaccccgtctctactaaaaatacaaaaaattacctgggcgtggtggcaggcgcctgtagtcccagctactcgggaggctcaggcaggagcagagatacctatctgttctcaggattttaaggtgttgcgcggaaataagaaaaccgtacagtgtttctcactacaaagcagggtcaggagatgcaaacaaactgatgtgggggttccaagtgaggtggaattccagacaggggccgggaagacttcgtggaaagggagaatctgaggtgggttttctaggatgggtaaagttcattagaggaagagaagtgcaacagaggaagttcggtgagaggtagagggaaggcgttctgatcatgaaggaaacactagaaaaggtatggagatagaaaaagataaggcctgattttttaacctaccacttaaaaaaaatccttgaaaagagatttttaaaacgaatacttggtgctgacaaaggtgaaatgaccgggcgcggtggctcacacctgtaatctcagcacattgggaggctgaggcgggcagatcacttgagctcaggagtttgagaccagcgtggccaacatggcaaaactccatctctactaaaaatataaaaattagacgggtgtgatggtgggtgcctgtagtcccaactactcaggaggctgaggcaggagaattgcttgaacccgagaggcggaggttgctgtgagctgagattgtgccactgcactccagcctggatagcaggatgagactgtctcaaaaaaagaaagaaaaggaaagaaaaaaaaatccgtactgtaaactggtaaaggctttctttctggagagcaatttggggcacatgcaccagtagccttagaaggctcatgcttttgacctaattatcctattagtggtgagatgattaaagatgtggccccaatttatgtgaaaggtatgcatcacatcttcactcataatcaggagagttggggaaaaccctagctgttaatagtttatccaaaatccatatatatatgtgtgtgtgtgtgtgtgtgtgtgtgtatggatttatatatatatataaatggatatatatatatatctggatggatatataaatatgatatatatatgtgtgtgtgtgtatatatatatgtgtatatatgtatatatatatgatggaatactatttagccataaaaaggaatgaattaatggcattcgcagtaacctggatggacttggagaccattattattttattttatttatttatttttgagacggagtctcgctctgtcacccaggctggagtgcagtggctcgagctcagctcactgcaagctccacctcccgagttgacgccattctcctgcctcagcctcctgagtagctgggactgcaggcgcccgccatcacgcccagataactttttgtatttttagtagagactgggtttcaccgtgttagccgggatggtctccatctgctgacctcatgatccacccgcctcggcctcccaaagtgctgggattacaggcgtgagccaccgcgcccagcgagactgttattctaagtgaagtaactcaggaatggaaaaccaaacatcgtatgttctcactcataagtgggagttatgctatgaggacgcaaaggcataagaatgatacgatagactttggggactcagggaaaaggtgggaagggggtgaaggataaaagatacaaattgggtgcagtgtatactgctcgggtgatgggtgcaccaaaatctcataaatcaccactaatgaacttactcatgtaaccaaataccacctgttcctcaataaaccatggaaattaaaaaagaaaaaagaaaaagtaccctggaaaaaaaatttctccctggccagtcacggtggctcatacctgtaatcccagcaattcgagaggctgaggcaggaggatcacttgagcccagtagttcaaaaccagccagtgcaacatagtgggaccctgtctcaaataaaatctaaaaattagccaggtgtgttggtgcatgtctgtggtcccagctactcaggaggctgaggtgagagtattgcttgagcctaggaggttaaggcggcagtgagccgtgattgtgccactgccatccaacctgggcaacaaagcaagaccctgtctcaaaaaaaaagaaaaaaaaaacctctctattcgccttttaagaatacctgggcttctctgtgtacacttaagcttcattggagtctttagactttttttttgctgtatctgtccagttaccaagtcccagcttctactccatgctccccatgctctcttcctattttattttccatgactgcctcggtataacttgtgctcaaccaaactggactactcaattccctgcattttcttttttaaagtttaatcaaaaaaaaaaagaaaactggctgggcacagtggcttctgcccacaatctcggtgctttgggaaactgaggcaggaggattgcttaaggccaagagttcaagaccagcctgggtaacatagcaagacctccatctccacaaaaaaatttaaaaattgactgagtgtgatggtgtgcaccttagtcccagctgcttgggaggctgaggcaggagaattgcttgagcccaggagttccaggttatgatgagctatgactgtgccaccgcactccagccagggtaacagagtgggactgtctcaaaaaacaaaacaaaatccctaatataatctcagtgtgccttttaagtatgccatatatatatatatatatatatatatatatcacattttctttatccactcattgattttcatgtagttctaatcgtagaattcatacattctttctatcttccatctttcacataacatcacaaacattttctaggttgccatattgtcttcatagttacttaaataatattccatcaagtagcacaatcatttatttcactagtcctctaactgtagacattttggttgtttttgaaacttaataatgtaaataacaccgtgataacaatgtttatgtaaattcatattttggattatctccttagggtggattcccagaagtcacattagtaggtcaaagagtatgagcctattttcaaggctcttgttttattaccttttaatttccacttgcctcaatattgctggtttgctcccttatgatcaccagagttactccgtcggtccaaattctttaccttccgaaactgggaaggccatgactcaatgttatatatatagtaaaggctactataaccttccccagaattttccaagccagtggtctctaaagtgacctttggctgttaaaatctgaattcagagggttcatgagactcagtgttgttgtagaatttaagctccttaatttgccacgttgtttagacaccacttaatactttattgcaaatgacttgtcaacgcctctcacctacaaacttcatcctcctacaaatatacctcctgctaatcaaatgaggctacagttgagtctttaagtttcagtagaaagatggcccttcctctggggtaggcgcatgctcttcatgctgaagctcagctgaaaagcctcctgctgagttttctgcctctttccctcccactgcacacaccccagggtgttggcgccacttcaaagggagcctgtggatgaagaaaacacaggtaaaggcagagggctcataagggggccataaatttaaaaagttaagattcctggcactatcaactctcacttgttttcaaatatgcatatggagtggatattccagttttcatgtctgtgttgttgtttttaaaaaaagacctttcaaagaactgtgcattttttacaggctgacaggctgtgtttggtgttaaactgtcagggctgactggtcacttggaaagggcaagggctgaggtgcatgcaagtgtcggctggttactcacagacacagcagccccttttaccccggagagagttctgtttgctggagcccttattctggccagcagtgtcacaaatgcacactgtaagacatagacagtcttggaaagaaagggaaactggctttaaaaattcttactccttctagcaaagcaattcatctttggctataaagaataacacagccaggtgcggtggctcatgcttgtaatcccagcactttgggaggtcaaggtgggcagatcacttgagtctaggagttcaagaccagcctgggaaacatggtgaaaccccacctctaccaaaaaaaaaaaaaagaaagaaagaaaagattagccaggtttggtggtacgtgcctgtagtcccaggtactcgggaagctgaggtgggaggatcgcttgagcctggagggcggaggttgcagtgagccgagatcatgccactgcactccagcctgggcaacagagtgacaccctgtatcaaaaaaaaaaaaaaaaaagaacagtaacacattattagaaatgagcattctgaggccaggcacggtggctcatgcctataatcgcagcactttgggaggccgaggcgggtggatcacaaggtcaggagatcgagaccatcctggctaacacggtgaaaccccgtctttactaaaaacacaaaaaattagccgggtgcagtggcgggtgcctatagtcccagctactcaggaggctgaggcaggagaatggcgtgaacccctgggaggcggagcttgcagtgagccgagatagtgccactgcactccagcctgggcgaaagagcgagactccatctcaaaaaaaaaaaaaaaaagaaagaaatgagcattctgaaatagtcttccatatgatgcttttgacaattcagcaggaaaataaaggatgtaagaaatgaatgcatatgttaggcctcttgttgacctgtggactaaattgtttctccctgcagagatcagcaaggacaactcctgcaaagaaaactgtacttgttcctcctgcttgctccgggcccccaccataagtgacttgctcaatgatcaggacttactagacgtgatcaggataaagctggatccgtgtcacccaacggtgaaaaactggaggaattttgcaagcaaatgggggatgtcctatgacgaattgtgcttcctggagcagaggccacagagccccaccttggagttcttgctccggaacagtcagaggacggtgggccagctgatggagctctgcaggctctaccacagggccgacgtggagaaggttctgcgcaggtgggtggacgaggagtggcccaagcgggagcgtggagacccctccaggcacttctagagctcttcttcttccttcattggcctctccggatgttgaaacaaccacaggtcaagaaggaatgtgaatctgttgttttataagagtttaggacaaggacgtggaacagtggacactggttttccccaaagctggcagttttgtggaggggtagcttgtttcggtggtggatctctgtttatttttgcacatctgttataatttaatattcaaatctggaattaagaaaacatattttctagtatcctctaagggccaaagtcctacaatcggaatggattcatgccacgttgaagataaaattatcctctctctgaaatacggtaaagatttaaataggtcctgagactgttgatagccccagacatacccacagcattatatgtaacatctctcctgatcagtgccattcccacggtttcaaagaaaacagctacaaggaatgcttacctgagtgtctgcagcaccctccacttctctcctaggcaatgagacccagtggctagaaattcaccatgtctattctcaagatccatgccagggagctctttgactctcgtgggaatcccactgttgaggttgatctcttcacctcagaaggtctcttcagagctgctgtgcccagtggtgcttcaactggtatctatgaggtcctagagctccaggacaatgataagactcgctatatggggaagggtgtctcaaagcctgttgagcccatcaataaaactattgcacctgtcctggttagcaagaaactgaacgtcacagaacaagagaagattgacaaacttatgatagagatggatggaacagaaaataaatctaaatttggtgcaaatgccattctgggagtgtccctcgctgcctgcaaagctagtgctgttgagaagggggttcccctgtaccaccacatcgccgacttgtctggcaactccaaagtcatcttgccagtcccggtgttcaatgtcatcaatggcagttctcatgctgtcaccaagctggccatgcaggagttcatggtcctcccagtcggtgcagcaaacttcagggaagccatgcccattggagcggaggtttaccacagcctgaagaatgtcatcaaggagaaatatgggaaagatgccaccggtgtgggggatggaggcgcgtttgctcccaacatcctggagaataaagaaggcctggagctgctgaagactgcgattgggaaagctggctacactgataaggtgatcgtcagcatggacgtagaggcctccgagttcttcaggtctggaaagtatgacctggaattcaagtttctcgacgaccccaccaggtacatctcacctgactgtctggctgacctgtacaagtccttcatcaaaaactacccagtggtgtctactgaagatccctttgaccaggatgactggggagcttggcagaagttcacggccagtgcaggaatccaggtagtggaggatgatctcagagtgaccaacccaaagaggacagcctcggccgtgaatgagaagaagtgcaactgcctcctgctcaaagtgaaccagattcgctctgtgactgagtcccttcaggcgtgcaagctggcccaggccaatggttggtgtgtcatggtgcctcatcattctggggagactgaaaataccttcatcactgacctggtggtggggctgtgacctgggcagctcaagactggtgccccttgctgatctgagcgcttggccaagtacaaccagctcctcagaattgaagaggagctgggcagcaaggctaagtttgccggcaggaacttcagaaaccccccagccaagtaagctgtgggcaggcaagcccttcagtcacctggtggctaattagacccctccccttgtgtcaactccggcagctcaagacccccgagcaacatttgtaggggccgctgctagttagctacccttgcccaccgccgtggagttcgcacctcttccttagaacttctacagaagcaggttgcagtgagccgagattgcgccactgcacaccagtctggagacagagtgagagtccgtcccagaaaaaaaaaaaaaaaaaaagaacttctacagaagccaagctccctggagccctgttggcagctctagccttgcagtcatgtaattggcccaaatcaccggagccacgtgaccctccagtgtcatctccggggtggccacaggcaagatccccagtgattttgtgctcaaaataaaaagcctcattgacccatgagaaaaaagaaaacagcaatgagaagtgaccctgtcttgttggtttattactttttttgttataaagtactttggtgaattaacaggatgctagtattacatggtgatactcttcagaacacctgccccatcttttttatgcaagtatgtttacaatcagtggactatcagtaatgtcatttgctcaaatattttttaaagacctacagaaactgatggttattgggaaaacagtcaggaagtagtgaggtaatcaaggccatgggaatagtgtttgacaaagagagtactccaaatcccttttggttacccaggactttaaaaaagagagtactccatcacacctgtaatcccagcactttgggaggccgaggcgggtggatcacgaggtcaggagatcgagaccatcatagctaacatggtgaaaccccgtctctactaaaaatacaaaacattagccgggtgtggtggcgggcgcctgtagtcccatctactcgggaggctgaggcaggaggatggcttgaacccaggaggcggagcttgcagtgagccgagatagcaccactgcactccagcctgggcgacagagcaagactgtgtctcaaaaaaaaaaaaaaagagtgctccaaatctcctttggttacccgggactttaaaaaatttaatgtgatagttaggccgggtgtggttgctcacgcctgtaatcctagcacttttggaagctgaggcgggtggatcatttgaggtcaggagttggagaccagcctggccaacatggcgaaaccccgtctctactaaaaatacaaaaattagccaggcgtggtggtgggcgcctgtaatcccagctcctcgggaaattgaggcactagaattgcttgaacccaggaggtggaggttgcagtgagccgagattgcgccactgcactccagcctaggcaacagagcgaggttccatctcaaaaaaaaaaattgtaataataataataacaatgtaatatttactttttcatcctttatataaggctgagtgcttcacccctgagatgaagctcagttaagaaataaatgaaaatcccgtaacctattggtgaaaggtaaccacccccagctcctactagcccaacttaaaacaggaccccatcacactacacagcagtttagccaagaaaagggggtctttatgtggacactgggagggaagggattccttcaaatccaaactttaaaggattttaaacaaatgaaacatttggttcaaagaatagctgatgtttttatttgatgattttggagaaaggaaagtgtggggcataatggggtttgttattggaaagatcagattttctaggtaatttgggtggagaaagacaaaaggcaaagctttgactgacaattccatgaaagtgctatttggttttggttatgggcttagaaaattaagacacttagttcaatttggaaggattctgtataagtccctgattaaaataagcaaaaatgatgaataacactgattcagtgcaaccgaaagattaggattaactcaaaagaaagttattttctaaaccaccgtgattttttccactgacaattacagcggttttcattaggttgctgacacatgaagtcagcctcaccatcagttgcaaactctaaactagcaaaatctattacagagacatacttatcacttctgatttagtgctaatctcacccagctcatcttctcttgtcagatttatgagataaatgtcagatttatcaccagatatattgaaagtaacagccagtaataaaatgtgagattttaaaaaatagattctttggcaaattggtgttcagtgaggcaattattaaacatttttgtcagccaggttccaggcactgtacagaagctgttaggagttctcaccatctacgaatttgatttgatgtattgtattctcattaagctatgtgtgacacattgtcatttattagcccagaatttaaaaagctgtggttgtttagtgttggtggtagcagaccccagcagtctgatggtctgcactccttccatcctgccaccccctggggatgcaaagactggatctcagggtgacaatcttcttgcgcacgactgcctggccaagtgcctccagaaagccccttccttcccccatttccacccaggcccacttgtcacctcagcctaacaccagcctgcacagtctacggccaccatccaggcagtgggagagggaaaggggaggagggtggaagggaaaacccctttctatacctctcctcagcctgctctttcctcctcccacctctgagcctccgcctcccccagacagagacagaaaagatggaagaacaggtgggacctccacccccaccccaagccttcatcccggtggagggggatgggaagatttctctcatttcaagagactcctccacctcagactgacaaaaggcagaggcctggcaagaagaaagggcaccctggggaagaagggcattgaaatagcacctgccgggccgggcacggtggctcacgcctgtaatcccaacactttgggaggccgaggcgcgtggatcacggggtcaggagttcaagaccagcctggccaagatggtgaaaccccgtctctactaaaaatacaaaaagtagccaggcgtggtagcgggtgcctgtagtcccagctactccggaggctgagacagggaactgcttgaactgggaaggtggaggttgcagtgagccaagatcgtgccatgcactccagcctgggcgacagagtgagactccatctcaaaaaaccaaaacagaaatagcacctgcccccaccccctgcccgccctccttcccgcccccgtcctttcctagacttcactcaagtcctctgctcagaggaagccctgctctactgaaagccacaaggccattctcggtggcctgggacagcagcccaagacgtgggcttctaactgcctccgaaggggccacagcagcaaacataaataaaaatagtaaaatgttcttaaattataaatttaaaatttggaaaatttagtgagcacagcttctagggggcatgtttccaaaattccaaccacaaaagtgcagtctcaaaactgactgtaaaccgaacataccatctcatctcagacacagctattgttcacgagtgtcagtggaactttcctcccttgagatggaccaaaaacgtcaagcaagatgacatttgctgatttgcaggcttcaggcagataagatacgggcagagttgagtgtgcgcctttacccttaaattcaggaatagcaggaacagcaggaaaaacgtaggaccacagcgtacgtcccacttgtctttcattttgatatcattatttccagagtcctgattgctagtcatgtctaacactggatttattatcatctcattgctagcatggctaggaaagctttgaacatccttatcattctattttaattcctattataattgcatggggaagttccagggtggaaaaatttccttttctttctttttttttttttaataggagagttggctgggcacggtggctcacgcctgtgatcccaacactttgggaggccaaggcgggtggatcacctgaggtcaggagttcgagaccaacctggccaacatagtgaaaacctatctctactaaaaatacaaagttagctgggtatggtggtgcacacctatagtcccagctactggggaggctgagacaggagaatcacttgaatacgggaggcagcagtgagccaagatcatgccactgcactccaacctgggagagacagagtgccatctcaaaaaaaacaaacaaaagagttgatataaatttgctgttataatttgactgtactgtttcttgcacatgttgacatctgtaatgactggagtttatgaaaatttttgatgagtaggagcataccattaacagagagaaatttaatcaaaagatttttaaagttccttcagagtccagactttgactaagtgtagtatgatttatatctatgttgcatacaaaaatatcaaacagtaattcccaactgaaatacaagtatcaatcaattgtgtaacaatgcaaaatcatttaatttaaagttaatttatagcaaatgagtactgtaatagcataagcatgccgatactttacaaaggagagagtggaaaggtaggatattataactaattgatcaaatcattgttaaaatttaagtttattaatacttttacttctgtccgtagggatccatgttaaattgggtatattataaacttaactgctaatgatgaggtccttttgctattagaaatctattttttatttttctttattattttttgaggcagggtcttgctctgttgcccaggctggagtgcagtggtgaaattatagctcactgcagcctcaacctcctgggctcaaggaatcctcctgcctcagcctcccaagtaatggaaactgcagtcgtatacaagcacacccagcaatttttttttttttttttggtagagatggggtttagctatgctgtccaagctggtctcaaactcctggcctcaagtgatcctcccaccttagcctccaaagtgctgggattacaggcgggagccaccattcccagcctagaatgaaatatctttagctaaattacagggctggatgtggtggctcatgcctgtaatcccagcactttgggagactgagggcgggagggtcacttgagatcaggagtttgagaccaccctgggcaacacagtgagaattctgtctctattttaaaaagagaaaaatctagggtatattctcttaaacaaaactttcatctataatggtagttgatgaggtcctatgtaatatgcatttccttggttgcaatagcaaattactacacacacagaaaggaaagccacactccccgacacatctacacacaggaggactcacacaggagggagactcaaagaaggcacgtgacttttacattgttagggcttacatggtcctgggatttcccaccagtactcaaaagatcaattgtatgaacaagtcacctatttttacggcactaaataattattattcaacaacatggaaaatatgtggtagcagacctggattttccttaagagttatttttatgtggtactgccccctgctggaatataacatctatacacatcctttctggctgggctgacatcctaaaaccagcccaggaccagccttttattaatattaattcttggccaggcgcggtggctcgcctgtaatcccagtactttgggagtccagggcgggcggatcacgaggtcaggagttcaagaccagcctggccaacatggtgaaactccggctctactaaaaatacaaaacttagctgggcatagtggcacattcctgtaatcccagttactcgagaggctgaggcaggagaattgcctgaaccgggacccgggaggtggaggttgcggtgagccgaaatcgtgccactgcactccagcctgggctacagagcgagactccgtctcaaaaataaataaataaaaattaaaattaaaaaataattcttggttgtatgctaaaagccttgcaagtagccccactggaagataggaagagtggggctgttttacaaatgagcacatataagcagaacgaggccgccataattgaaatgaaggtccccgtcccgtggatgtgttcatcgctacttcaccctgtcattcggatccaatgtgtgaccagccagctccaataacagttccatactctgggaattatttttaacactcggcaggatgctttcttcctgtagttttaggcttagccctttgtgcacttttggtctctttccctttcaatttagcatccaaggaagcggctgtgaccaaaggtagctgtcatgttaaaggacaaagttcatagttacagcaaatattgacccagagcactatccttgccccttcctctataatgtgcaatgcaaaaatatgttcttttaagtacaatattaataagtaaggtctaggagattttcttcccccttcctttctcttttagatgagtaaatgttttatctagttttgaggagactatccttcttatcacatctctttccacttctgctctccttgttttataattttcctctcctttgggtccgtgtcattatttcgtgtcgcttgttttcgagccatgcactcatttatcaaatcagatttcctccgtatgccgacggccttcctctccctgccacgggcttcctttttccctgactatgcagaagcaatttgttcgcttgtgtttctttttttttttgagacagagtctcgctctgtcacccaggctggagtgcagtggcgacatctcggctcactgcaacctccgcctgtcaggttcaagcaattctcatgcgtcagcctccagagtagctgggattacaggtgtttgccaccaaggctggctaatttttagtagagacggggtttcaccatgttggccaggcttgtctcgaactcccaacatcagttgatccacccatctcggccttccaaaatgctgggattataggcatgaaccaccgcatctggccttgtctttcatccttaatgacactttagtcctaataatgctaaaatcattttctactctttgaattgaaacacagcttatctacatgagcccaaggcagtagcaacattcacctccatttcttctctgatctctaccttctgaaccctgtggacttggttgtaaatggatgagggcaagtcttgcttccttcccctgtgtttacagaggatcgtggctgagatgctgggccacactctgggcctgctggcacccctgggccggtggctgctgcccctcagggtgctcaccacctagaccagaagaaccaaggtgagggagagcctgttttctttcttcctgtggctgcgggggctgtgaggcatgggtctagtggctgtgtttagctggggatgcctcctagaaatcagctccaccgttgaagagatcaaagcaatgcacagtgccacttgaaatgaaacgattgagcttatcagcgcttttgcaaatgtacaagagggtagctcccccggacatcctgaactgagccatgctcttctattttgtgtaacagcccagtgacccctgaatcttcccctgaggcaggtccccgaagcttcatggaggatgttcctcagctgaccaaggtgaggctcttgagctcctaaatctttgtgatactgtttatacatctttgtgctgtactttttaagctgacttcgtgttatcacctgtatgattttatgttttgcttctaaataagtacagattattttaaactctaataatgggtgctacaaaattaaagattatgtcaatcactgtctctgatgagttattttatgtagatttcaacacaatcattgattcatgtgtactcttggtcagtcatcagtcatctgagtacctagtgggtttccaaaatgggtcctggatgctggggatgcaaagataagcaacacatttctatcctcaacagcctgtagatgagggagaatcactgcggacaatcagggaagttaccggagagagcagtgcacatgtggtctagaaactggtggaacaaagttgagaatcactgaactaggaggaaagacaggtcactgacaatccaaggcacagtgactcacactctaatctcagcactttgggaggccaaggcaggaagatccactgagctcaggagataaagaccagcctggctgacctatggagacccttctctaccaaaaaaaaaaaaaaaaaaaaaaacattagcctggcatggtggggtgtgcctgtggtaccagctattcaggaggctgaagtgggaggatcgcttgagcccgggaggtcaagactgcagtgaatcatgatcacaccattgcactccagcctagggaagagagcaagaaagaccctgtctcaaaaacagaaaaaaatccagtaaaatgtttcagatgttgttaaaggtgatttcactgttacttttcacctctcctcattttacatctctgacctatgcttgtcctctgacttgccagacattcctagctatggacttgatgtctcgacatggaggctcacaggcaccccaaactcagcctgccctaagctgaacccatgatctttccttccaaacttgtttctcaccagagttcccatcttaccatccacctagttgttcaagtcatccttaagacctccctctccttcactgtctattctacctccctaatatctcttaaatccttccctcctctcccacctcacagccaccatcctaacctaagcagccaccctttctcaccctataatgacctcctggctgttctctatagagttggtgaatcctttcgtcttcagcctgaaccccctttcgagggattcttatatatatacatagatatacacaaatatatatgtacatatgtacatatgtgtgtatatatgtacatatgtgtatggatatacatatgtacatatgtggatgtacatatgtacatgtgtatgggtgtacatatgtacatgtgtatgggtgtacatatgtacatgtgtgtatgggtgtacatatgtacatgtgtgtatatatgtacatgtgtgtatgtacgcatgtacatatgtgcatgtatgtgcatgtgtatgtgtgtgtatgtacacgtgtgcatatgtgtgtatatatgtacacgtgtgtatatatatatatatatactgtgggtgtacatatgtacatgtgtgtatgggtgtacatatgtacatgtgtgtatgggtgtacatatgtacatgtgtgtatatatgtacatgtgtgtatgtacgcatgtacatatgtgcatgtatgtgcatgtgtatgtgtgtgtatgtacacgtgtgcatatgtgtgtatatatgtacacgtgtacgtgtgtatatatatatatatatactggctggagtgcagtgggaaagttttggctcaccacaaactccacctcccaggttcaagtgattctcctgcctcagtctcctgagtagctgggattacaggcgtgcaccaccatgcccagctaatttttgtatttttagtagagacggggtttcaccatgttggccaggctggtcttgaactcctgacctcaggtgatccacccacctcggcctcccaaagtgctgggattacaggcgtgagccaccgtgcctggccggattcctatcttgaagacgaagccccagaccatcgacacggcctcaaggccctgcatgacgcctcctgccccaacacctcgtgtcatcttgctctcctctcccgcagctcctgaggctttagccaccctggaattccaagtccccatggtcatttttttttcctgctcaagatatcaccatgtgctgtcccctctgcccttgtctacacccacgtgtccttctcccgccccggccacactcatggggcacactgtccttccctggctaatcctcccacactcgataccactttctctgggatattgcacccgatcctcagccgcagttgtcttcctatgacccactcccacagctctcgccacaatggtaattgtttgattcctacttgttgtccctgtgagactgcaaaccccagaggacaggggccctgggttctccttcgcctctggatcatcagcactaactgaatacctggcctagaagagatgctaacgatgctgaatgaataaataagtggaaagactctcagtaaagcaaaacctttctttaccattttatggccgtcaaggaggaaaacacattatcagtggaaaacgcaaaatgaggggatttgcttagcaaacgatgaattcctctggcaccctggcagccttggtttcttttgatgaggtccacccccttccatccatcttctgggcttaagagatcaaagcaaaacatgctgtggaattcgatac

SEQ ID NO: 3196 - DNA, 1559 bp, Homo sapiens
agtgagctcgtggaagaagcgaaggaggagaagaagaagggaggggaaggcggaggagggcaggggcgcgcagagccacggtttgctccaggcgcgtcggaaccgcaggacttttcatccccgtggtcccacggtcctcccgcgccccggaggcctgccagccccgctcggacgctcgtttgcccctaacccgccgccatggcttcaccggacgaccctctgcgcgcagatcatatggtaaaggaaccagtggaagacacagaccctagcactttatcctttaatatgtcagacaaatatcccattcaagatacggaactccctaaagctgaagaatgtgatacaattactttgaactgcccacgaaattcagatatgaaaaatcagggagaagaaaatggctttccagatagcactggagatcctcttccagagatcagcaaggacaactcctgcaaagaaaactgtacttgttcctcctgcttgctccgggcccccaccataagtgacttgctcaatgatcaggacttactagacgtgatcaggataaagctggatccgtgtcacccaacggtgaaaaactggaggaattttgcaagcaaatgggggatgtcctatgacgaattgtgcttcctggagcagaggccacagagccccaccttggagttcttgctccggaacagtcagaggacggtgggccagctgatggagctctgcaggctctaccacagggccgacgtggagaaggttctgcgcaggtgggtggacgaggagtggcccaagcgggagcgtggagacccctccaggcacttctagagctcttcttcttccttcattggcctctccggatgttgaaacaaccacaggtcaagaaggaatgtgaatctgttgttttataagagtttaggacaaggacgtggaacagtggacactggttttccccaaagctggcagttttgtggaggggtagcttgtttcggtggtggatctctgtttatttttgcacatctgttataatttaatattcaaatctggaattaagaaaacatattttctagtatcctctaagggccaaagtcctacaatcggaatggattcatgccacgttgaagataaaattatcctctctctgaaatacggtaaagatttaaataggtcctgagactgttgatagccccagacatacccacagcattatatgtaacatctctcctgatcagtgccattcccacggtttcaaagaaaacagctacaaggaatgcttacctgagtgtctgcagcaccctccacttctctcctaggcaatgagacccagtggctagaaattcaccatgtctattctcaagatccatgccagggagctctttgactctcgtgggaatcccactgttgaggttgatctcttcacctcagaaggtctcttcagagctgctgtgcccagtggtgcttcaactggtatctatgaggtcctagagctccaggacaatgataagactcgctatatggggaagggtgtctcaaagcctgttgagcccatcaataaaactattgcacctgtc

SEQ ID NO: 3197 - protein, 203 aa, Homo sapiens
MDDDPLRADHMVKEPVEDTDPSTLSFNMSDKYPIQDTELPKAEECDTITLNCPRNSDMKNQGEENGFPDSTGDPLPEISKDNSCKENCTCSSCLLRAPTISDLLNDQDLLDVIRIKLDPCHPTVKNWRNFASKWGMSYDELCFLEQRPQSPTLEFLLRNSQRTVGQLMELCRLYHRADVEKVLRRWVDEEWPKRERGDPSRHF

SEQ ID NO: 3198 - DNA, 2953 bp, Homo sapiens
atgcttaaatacacgcactggaatgctgtgtctctgacaaacagaaatcaaatcagcacaaaggcagaccaagaggaagtttatcctcccacctacaaattccccagagagctttcatctagaaggtttgactctggccagacaaccagcgagcatcttctcgcaatctgttgcttcttccatggcaaactccagagaattaagaagccaaactcaacatcgccatgggcctcaggacgactaaacagatggggagaggcactaaagctcctggtcaccaagagggacttttcatccccgtggtcccacggtcctcccgcgccccggaggcctgccagccccgctcggacgctcgtttgcccctaacccgccgccatggcttcaccggacgaccctctgcgcgcagatcatatggtaaaggaaccagtggaagacacagaccctagcactttatcctttaatatgggagaagaaaatggctttccagatagcactggagatcctcttccagagatcagcaaggacaactcctgcaaagaaaactgtacttgttcctcctgcttgctccgggcccccaccataagtgacttgctcaatgatcaggacttactagacgtgatcaggataaagctggatccgtgtcacccaacggtgaaaaactggaggaattttgcaagcaaatgggggatgtcctatgacgaattgtgcttcctggagcagaggccacagagccccaccttggagttcttgctccggaacagtcagaggacggtgggccagctgatggagctctgcaggctctaccacagggccgacgtggagaaggttctgcgcaggtgggtggacgaggagtggcccaagcgggagcgtggagacccctccaggcacttctagagctcttcttcttccttcattggcctctccggatgttgaaacaaccacaggtcaagaaggaatgtgaatctgttgttttataagagtttaggacaaggacgtggaacagtggacactggttttccccaaagctggcagttttgtggaggggtagcttgtttcggtggtggatctctgtttatttttgcacatctgttataatttaatattcaaatctggaattaagaaaacatattttctagtatcctctaagggccaaagtcctacaatcggaatggattcatgccacgttgaagataaaattatcctctctctgaaatacggtaaagatttaaataggtcctgagactgttgatagccccagacatacccacagcattatatgtaacatctctcctgatcagtgccattcccacggtttcaaagaaaacagctacaaggaatgcttacctgagtgtctgcagcaccctccacttctctcctaggcaatgagacccagtggctagaaattcaccatgtctattctcaagatccatgccagggagctctttgactctcgtgggaatcccactgttgaggttgatctcttcacctcagaaggtctcttcagagctgctgtgcccagtggtgcttcaactggtatctatgaggtcctagagctccaggacaatgataagactcgctatatggggaagggtgtctcaaagcctgttgagcccatcaataaaactattgcacctgtcctggttagcaagaaactgaacgtcacagaacaagagaagattgacaaacttatgatagagatggatggaacagaaaataaatctaaatttggtgcaaatgccattctgggagtgtccctcgctgcctgcaaagctagtgctgttgagaagggggttcccctgtaccaccacatcgccgacttgtctggcaactccaaagtcatcttgccagtcccggtgttcaatgtcatcaatggcagttctcatgctgtcaccaagctggccatgcaggagttcatggtcctcccagtcggtgcagcaaacttcagggaagccatgcccattggagcggaggtttaccacagcctgaagaatgtcatcaaggagaaatatgggaaagatgccaccggtgtgggggatggaggcgcgtttgctcccaacatcctggagaataaagaaggcctggagctgctgaagactgcgattgggaaagctggctacactgataaggtgatcgtcagcatggacgtagaggcctccgagttcttcaggtctggaaagtatgacctggaattcaagtttctcgacgaccccaccaggtacatctcacctgactgtctggctgacctgtacaagtccttcatcaaaaactacccagtggtgtctactgaagatccctttgaccaggatgactggggagcttggcagaagttcacggccagtgcaggaatccaggtagtggaggatgatctcagagtgaccaacccaaagaggacagcctcggccgtgaatgagaagaagtgcaactgcctcctgctcaaagtgaaccagattcgctctgtgactgagtcccttcaggcgtgcaagctggcccaggccaatggttggtgtgtcatggtgcctcatcattctggggagactgaaaataccttcatcactgacctggtggtggggctgtgacctgggcagctcaagactggtgccccttgctgatctgagcgcttggccaagtacaaccagctcctcagaattgaagaggagctgggcagcaaggctaagtttgccggcaggaacttcagaaaccccccagccaagtaagctgtgggcaggcaagcccttcagtcacctggtggctaattagacccctccccttgtgtcaactccggcagctcaagacccccgagcaacatttgtaggggccgctgctagttagctacccttgcccaccgccgtggagttcgcacctcttccttagaacttctacagaagcaggttgcagtgagccgagattgcgccactgcacaccagtctggagacagagtgagagtccgtcccag

SEQ ID NO: 3199 - protein, 386 aa, Homo sapiens
MSILKIHARELFDSRGNPTVEVDLFTSEGLFRAAVPSGASTGIYEVLELQDNDKTRYMGKGVSKPVEPINKTIAPVLVSKKLNVTEQEKIDKLMIEMDGTENKSKFGANAILGVSLAACKASAVEKGVPLYHHIADLSGNSKVILPVPVFNVINGSSHAVTKLAMQEFMVLPVGAANFREAMPIGAEVYHSLKNVIKEKYGKDATGVGDGGAFAPNINKEGLELLKTAIGKAGYTDKVIVSMDVEASEFFRSGKYDLEFKFLDDPTRYISPDCLADLYKSFIKNYPVVSTEDPFDQDDWGAWQKFTASAGIQVVEDDLRVTNPKRTASAVNEKKCNCLLLKVNQIRSVTESLQACKLAQANGWCVMVPHHSGETENTFITDLVVGL

SEQ ID NO: 3200 - DNA, 1478 bp, Homo sapiens
atgggcctcaggacgactaaacagatggggagaggcactaaagctcctggtcaccaagaggatcatatggtaaaggaaccagtggaagacacagaccctagcactttatcctttaatatggtagacaaatatcccattcaagatacggaactccctaaagctgaagaatgtgatacaattactttgaactgcccacgaaattcagatatgaaaaatcagggagaagaaaatggctttccagatagcactggagatcctcttccagagatcagcaaggacaactcctgcaaagaaaactgtacttgttcctcctgcttgctccgggcccccaccataagtgacttgctcaatgatcaggacttactagacgtgatcaggataaagctggatccgtgtcacccaacggtgaaaaactggaggaattttgcaagcaaatgggggatgtcctatgacgaattgtgcttcctggagcagaggccacagagccccaccttggagttcttgctccggaacagtcagaggacggtgggccagctgatggagctctgcaggctctaccacagggccgacgtggagaaggttctgcgcaggtgggtggacgaggagtggcccaagcgggagcgtggagacccctccaggcacttctagagctcttcttcttccttcattggcctctccggatgttgaaacaaccacaggtcaagaaggaatgtgaatctgttgttttataagagtttaggacaaggacgtggaacagtggacactggttttccccaaagctggcagttttgtggaggggtagcttgtttcggtggtggatctctgtttatttttgcacatctgttataatttaatattcaaatctggaattaagaaaacatattttctagtatcctctaagggccaaagtcctacaatcggaatggattcatgccacgttgaagataaaattatcctctctctgaaatacggtaaagatttaaataggtcctgagactgttgatagccccagacatacccacagcattatatgtaacatctctcctgatcagtgccattcccacggtttcaaagaaaacagctacaaggaatgcttacctgagtgtctgcagcaccctccacttctctcctaggcaatgagacccagtggctagaaattcaccatgtctattctcaagatccatgccagggagctctttgactctcgtgggaatcccactgttgaggttgatctcttcacctcagaaggtctcttcagagctgctgtgcccagtggtgcttcaactggtatctatgaggtcctagagctccaggacaatgataagactcgctatatggggaagggtgtctcaaagcctgttgagcagctctagccttgcagtcatgtaattggcccaagtgtcatctccggggtggccacaggcaagatccccagtgattttgtgctcaaaataaaaagcctcattgacccatgagaa

SEQ ID NO: 3201 - protein, 215 aa, Homo sapiens [sequence omitted]

SEQ ID NO: 3202 - DNA, 1646 bp, Homo sapiens
agtgagctcgtggaagaagcgaaggaggagaagaagaagggaggggaaggcggaggagggcaggggcgcgcagagccacggtttgctccaggcgcgtcggaaccgcaggacttttcatccccgtggtcccacggtcctcccgcgccccggaggcctgccagccccgctcggacgctcgtttgcccctaacccgccgccatggcttcaccggacgaccctctgcgcgcagatcatatggtaaaggaaccagtggaagacacagaccctagcactttatcctttaatatggtagacaaatatcccattcaagatacggaactccctaaagctgaagaatgtgatacaattactttgaactgcccacgaaattcagatatgaaaaatcagggagaagaaaatggctttccagatagcactggagatcctcttccagagatcagcaaggacaactcctgcaaagaaaactgtacttgttcctcctgcttgctccgggcccccaccataagtgacttgctcaatgatcaggacttactagacgtgatcaggataaagctggatccgtgtcacccaacggtgaaaaactggaggaattttgcaagcaaatgggggatgtcctatgacgaattgtgcttcctggagcagaggccacagagccccaccttggagttcttgctccggaacagtcagaggacggtgggccagctgatggagctctgcaggctctaccacagggccgacgtggagaaggttctgcgcaggtgggtggacgaggagtggcccaagcgggagcgtggagacccctccaggcacttctagagctcttcttcttccttcattggcctctccggatgttgaaacaaccacaggtcaagaaggaatgtgaatctgttgttttataagagtttaggacaaggacgtggaacagtggacactggttttccccaaagctggcagttttgtggaggggtagcttgtttcggtggtggatctctgtttatttttgcacatctgttataatttaatattcaaatctggaattaagaaaacatattttctagtatcctctaagggccaaagtcctacaatcggaatggattcatgccacgttgaagataaaattatcctctctctgaaatacggtaaagatttaaataggtcctgagactgttgatagccccagacatacccacagcattatatgtaacatctctcctgatcagtgccattcccacggtttcaaagaaaacagctacaaggaatgcttacctgagtgtctgcagcaccctccacttctctcctaggcaatgagacccagtggctagaaattcaccatgtctattctcaagatccatgccagggagctctttgactctcgtgggaatcccactgttgaggttgatctcttcacctcagaaggtctcttcagagctgctgtgcccagtggtgcttcaactggtatctatgaggtcctagagctccaggacaatgataagactcgctatatggggaagggtgtctcaaagcctgttgagcagctctagccttgcagtcatgtaattggcccaagtgtcatctccggggtggccacaggcaagatccccagtgattttgtgctcaaaataaaaagcctcattgacccatgagaa

SEQ ID NO: 3203 - protein, 203 aa, Homo sapiens
MDDDPLRADHMVKEPVEDTDPSTLSFNMVDKYPIQDTELPKAEECDTITLNCPRNSDMKNQGEENGFPDSTGDPLPEISKDNSCKENCTCSSCLLRAPTISDLLNDQDLLDVIRIKLDPCHPTVKNWRNFASKWGMSYDELCFLEQRPQSPTLEFLLRNSQRTVGQLMELCRLYHRADVEKVLRRWVDEEWPKRERGDPSRHF

SEQ ID NO: 3204 - DNA, 1823 bp, Homo sapiens
atgcttaaatacacgcactggaatgctgtgtctctgacaaacagaaatcaaatcagcacaaaggcagaccaagaggaagtttatcctcccacctacaaattccccagagagctttcatctagaaggtttgactctggccagacaaccagcgagcatcttctcgcaatctgttgcttcttccatggcaaactccagagaattaagaagccaaactcaacatcgccatgggcctcaggacgactaaacagatggggagaggcactaaagctcctggtcaccaagagggacttttcatccccgtggtcccacggtcctcccgcgccccggaggcctgccagccccgctcggacgctcgtttgcccctaacccgccgccatggcttcaccggacgaccctctgcgcgcagatcatatggtaaaggaaccagtggaagacacagaccctagcactttatcctttaatatgtcagacaaatatcccattcaagatacggaactccctaaagctgaagaatgtgatacaattactttgaactgcccacgaaattcagatatgaaaaatcagggagaagaaaatggctttccagatagcactggagatcctcttccagagatcagcaaggacaactcctgcaaagaaaactgtacttgttcctcctgcttgctccgggcccccaccataagtgacttgctcaatgatcaggacttactagacgtgatcaggataaagctggatccgtgtcacccaacggtgaaaaactggaggaattttgcaagcaaatgggggatgtcctatgacgaattgtgcttcctggagcagaggccacagagccccaccttggagttcttgctccggaacagtcagaggacggtgggccagctgatggagctctgcaggctctaccacagggccgacgtggagaaggttctgcgcaggtgggtggacgaggagtggcccaagcgggagcgtggagacccctccaggcacttctagagctcttcttcttccttcattggcctctccggatgttgaaacaaccacaggtcaagaaggaatgtgaatctgttgttttataagagtttaggacaaggacgtggaacagtggacactggttttccccaaagctggcagttttgtggaggggtagcttgtttcggtggtggatctctgtttatttttgcacatctgttataatttaatattcaaatctggaattaagaaaacatattttctagtatcctctaagggccaaagtcctacaatcggaatggattcatgccacgttgaagataaaattatcctctctctgaaatacggtaaagatttaaataggtcctgagactgttgatagccccagacatacccacagcattatatgtaacatctctcctgatcagtgccattcccacggtttcaaagaaaacagctacaaggaatgcttacctgagtgtctgcagcaccctccacttctctcctaggcaatgagacccagtggctagaaattcaccatgtctattctcaagatccatgccagggagctctttgactctcgtgggaatcccactgttgaggttgatctcttcacctcagaaggtctcttcagagctgctgtgcccagtggtgcttcaactggtatctatgaggtcctagagctccaggacaatgataagactcgctatatggggaagggtgtctcaaagcctgttgagcagctctagccttgcagtcatgtaattggcccaagtgtcatctccggggtggccacaggcaagatccccagtgattttgtgctcaaaataaaaagcctcattgacccatgagaa

SEQ ID NO: 3205 - protein, 119 aa, Homo sapiens
MLKYTHWNAVSLTNRNQISTKADQEEVYPPTYKFPRELSSRRFDSGQTTSEHLLAICCFFHGKLQRIKKPNSTSPWASGRLNRWGEALKLLVTKRDFSSPWSHGPPAPRRPDARTLVCP

SEQ ID NO: 3206 - DNA, 209421 bp, Mus musculus
  misc_feature (1)...(209421): n = A, C, G, or T/U
atcaccaccatcatatatgtcagcaccatcatcattactatcatcattattgctatcatcccaccatcatcatcaccaccacctccacctccaccaccattggggtagcaggggagtttatgaagctccagaactcagccgaaggaaaatcaaatggcagtgtccaacccccaaggccggattccctcaacaagaagctattcctccttgtcctgggaggaagtgcgctttctcagtctcactcctcatctggagttgcagctgagcccacctaccctgtaagctgccttggagctctctgcttacatgaccacaccttcacggcagtttccaatgggcccaggcatctctaaatgcatgtacaggtgctttgtcttcatgtgtgtctgtgtgccatgtgtgtgtgcagtacaggaggaagccagaaggcttcagatctcctagaactgacaactgatggcggctgtcagccattatgtggatgatgggaaccaaacctcagcccactggaaaagcacccattgttcttaacttcagagctgtttctctagcccctgtcctccttttcttcctggggtaccttggactgaagtcagatcctcacataagataggcaagtgctctatcaatgagcttagccccagcttttttttttttttttttttttttttgagatgggggtctcactaacttgcccaggttggccttgactcatttgacaacccaagccagacttaaatttgttattcacctgtctcagtgtcttgagttgccgggttgacagattggtgctactaggtcttgctgggtccctgctccccttcatttgacatttgcatgggcttcaataccaatgtatgtcttgaatctcttttctgggatggacattgttacccttctggaaggaccatgtattttatttctagtaagatggtactacacctactccaacaaagccatacttcctatcccttgtaatttctaatcctttcaaacagttccactctctggtgactaatcatttgaatatatgagcttttgggggccactctcatttgaaccagcacaaccataagtcaactgcctgctaaattgatgtcccccatgggtttttgtattttggcagctgctgcaattttggaataagctaatgagaggggggaggaggggaggaggaagggaagggagaaggatcgggagagggagagagatcatttgcttccattcaaaccttcaggcaagcatttagtaaaacgaatatcttctcttggctgtcactggcatcccgcggaacctatacacagtgagcagggccatcctcctgaatgtgggtcatacactgggttctttgcatcatccatgctgcctgagaccagcaattctacagatattttgtggaaataggcctggccttctggtgtcaaatttagtcacacttggcatttgaacaagctccctaggttatttaaatgcacattaaagttgaagaaggggaggaaacagcatggaaaaagtggtgagcaagatgctggtggcttgaagatacttagtaaaggaaaagggccatgtttcaagcaaggggagggagatgctaagagggcaggcaggtgggtaaagatggctcttcttttcatctttggtatctccttactgctctctagccacatctgacttggtaagtaagactttggttaattttgtcgccagttgtttgagaaaagatatcaaaggtatgccaacatgttatttctctgctgtaaaaggaaggccactgcaatttcaaaagagtaggaagggtggagtttcagaggaacaggcagcagtgagtcagcttagctttgaggagggctcacttcattgatcttcacttctctttaaaacgcatcgcatagttaagagcatttgggagaagctggcctgtctccgaacttcctggtctttaattcttaggtctagagtcaacctttcaaagttttttttcctgacattgggtaggcatgaccatgctcttcgagagactcctgtgcaggctggtgagaggtgtcctctcaccagtctctgtaaaacctgcttgttttcctacctggaatcctagcaaacctaggatgtctttcagctatattttggtcctagtactggaacattgcaagtatacagaaaaaaatccatcagtgaaatgaaggcctataacagtgctccaattttgggatcttttttattttattaaaaaaattttttggagacaatctcatataccttggaattgccttggtctatagatctttctgctttatatctcccaagagctgggattatacttatgtaccatcatgtctagtcagtcctgcaatcttaccaaaagattttgatattaggtagggttagggatgacttttttttttcaataggaaattgtgatattatcaaaaatgattgagaaaatatacctattaaactttttattggctggggtgtatcttggtgggataatgtttgccaaggcccttgatcttattcccagtactccaaattgtacaacatggctttatgagtaggcagtgaaacacacaccttcacctattccttaccacatgtactagataccatttcatgtctgtgatcaaatacctgacaagaagcaatttaaaagagaaaaggtttattttggcttagtgtagttagttcatcatggtggagaggtatagcatcaggaatatgaggtggatggtcacattgcatttgcagtcaggaagtagagagtagacaggaagaatccttaaggacccctcccccatctcagcccaggtacccacttcctctaataagttcccacctcatggattggctcccagctggggatcaagtgttccaacaaatgaatccaagggggatatttcatattcgatctgcaacactatgtttgcttgccaatgtgcctgctcctcctcacctggccttttcctgcctctttgcacctgcagctttgtgagcaggcgatactctgttctgtggatccactgatgagtgggagtgtgtgtttctggtttccttctgaattgcctgtcttgagctcttaaacttagatgctctcatgctctttaatatcctctggcaatctgggttcctggctttagaaacaggactacataggaaacctgctttcctaatgatagctctttaaaatcccttttcacttctacagcccgtttattatgtagggctgactcagtttgcttttctaaagtacacagctcatgtaggttacagctgaaagttaataaaaaacttgccagccatgggactatattgtgtataaagactgacaaatatttgctatttaaatatgaataccaagtacctgaatcggcttatgcttaataactgaccaaaatcctaccctcctcctctccttcctcatttaattttgcaatctaaagagtgaacctaggatttggcacatgctaggcaaatgagctataccttttgttttgggattaactcttgctaaattttctagttgaacccattgtatagccccagcagtgattaaagttgtgattcttcgggtagttaggattacaggcctggatgaaatactagttgttttttttttttttttcagtgacagtgatggtgataataatattaaaaacaataatgtgtggtgtacgcctttaatcacagcacttggaaggcagaggcaggagaacttgtgagttccaggagagccatggttacataaagagatcctgtctcaagaaaaaaaaaaggaacagtaatgtgtatgtgtttcagtgtgtgcactaaaacatctgtggaaaagtatctcagcaactagtaattgcctttggcataacactatacttcattttctatattttgtatttctcttgagcctggcttatatgattctctctctctctgtctctctctctgtctctctctctgcctctctctctgtctccctctgtctctgtctctctggctctgtctctgtctctgtctctgtctctgtctctctctctctcacacacacacacacacacagatttccaataagaagcataaaataggtcatattttgaaaagaaaataatactttaatgggaaaatgacactattgcacgcaagcagtctttcctacacatgaaatcgaacctcaagtcacacttagcacagggtttccacagcaaagaggaaaatctgaatcacttcaagacttctcactagttccaaaggtcatctcataaaggagcttttgaatttcataaatcttaaataaagtgtccacacaataaggacatttgctatcactgaaacagcaaagaaaattgcattaaaggcttgcactaaaatcaactttgatagtatagcttttgtaaagaagaagagaagatgatagttatgaagatattaattatgaattagacacttcaataaaaatttaaggtatctgtttaaaaccacattttaaagatttattaaggtaaagcatccaaaactcagtctatatgtctaaaatagtaaaaaaaaatagttattatactattatctcttttgaaatactgggaatcaagcccaaggcctcatccacactaaactctactgctaaactaatttctcagtctgatatgtctctgacgtttttggatgtataggtgtgtgtgtgttgacatgtgtgctggtgaacatatgtgaacagttgttgtgcaagtcagggtcttctttaattttttactgagtcagggtcactcagatgaacctagagcgagacatgtggtaagcctggcttccaagcactggattgcacacacattgggtccacacacattggtatttatgctaggttctgggtatcccaactcctgtcctcaccctttttcagtgcaactcactcatataccatgttctacagtgtgggtttctcattgtgagacaaatcttcatcaagtggaccaacttccctgatttttttttttatggaaccattacttggtcttgagttagatgtataaatatagctaaatatattattttgactattatattattatagaaattgcatcctgccacacttcacaaatccactaggcatataaacttaactcagaattataatcaatatactctttggatgcttatttggaatttaagcaggttttcttttttgttttgtttctgagataaggtcttactctgaaatccaggctagtcttgaatttacagtgatccttctgcctcaccttctctggtattcaaattacaggcaagagacactatggctacctacaacattttcttaatgaaagcattcattcagatatcctgagtgcctggtaatagtgtgtgtgtgtgtgtgtgtgtgtgtgtctgtgtgcatgtgtgccagtgactacagaagacagaggtattttgaactcagggctttgtgatatatcatgtggtgcaaagcttggatcatgtagtcttaagtgggagagatgattacaataaacatgctagccaggcctgggcaatataatgagactgttttaaaacagaacagtaaaatgtgggctggacatctatcttggtgctagaacacttgcttagcatgttcaaggctctggaaccaataccaagaaagacaaaaaaaaaaataaataaacaaatcatttaatatgttacaattgataggtgctatgaaaaacatgtttaaagttacaaattacatttcatgacttgcactcatggtacactgtctagcataaaatgtgatgttcttgtgggtcttgtattctaatcgagagtgatgataaaaataagcaaagcagctgggcatcgtggtgtaggtctgtcctctcaactgctctgaagactagggaaccaagtggcacatcacctatattaaaaaaaaaaaagcaaagcagttatttagagtgtcttacggaagaaattcaggcacagggtccagggcagaagcggttgttgctgagttttcaaggtggtactgagggtagatcttactagaagataaaaattagattatagctaagggaattattattgtggctatccaaagagaaagcactttgtgtggaggggccagacagtaccagatcttaaaagcaagaacttgcctggaagtatatgcctaacagtgaagaggccactctgtttgagaggaaggaaggaagagggaagtgaggttcgggcagatactaagctctgaaggtcattgcaaggactttggcttttgctgaagtgaaatgaggagccatgtgacctcttaaaacatttgaagtatttagggaacaattaaatatgaagatgtgcacattagaatatttattttaaagtcttaatgttatagtctcattttagcattcattctgagacaagttatattgtcaatttaccgctatcaaactcctccaggggagcaaataaacataagtacagtttccttttttattattcattttttctatagatgttttttacttttgtatgttctcaattactatcttgatatccatttgaaatctcttaagctaagtgtctcaagcttaggtatacttagtgttctacaacttattaatatttactcatttctggttttgttgttttgagaaagggcctcaaactcattatgtggccaaggatgaccttgaactcctgatcctcctgcctccacttcctgagtgctaggcatgcacgattatacctgagtattaattttctaatatgccatgttagttttgtttttacatgcacttacatgtttatttgtctgctcggtatgtgtgtgtgtatgcatgtgcacaagccatgaaacacatatggagatcagaggacaacttttagaatttggttctttccttctgtcatgtgagttctgacaatcaaattcaagttgtcaaggttagtgttgaatttgtggcaattgttctgcctcagtctctgaaatgctaagaatgccagtgttcactactacacttgtcttaattctaagtgttcttgaacaaaataaatactgtagtatcttgtttaaaatcctttatgatgaagacagataatgtcacaaatgccattactttggcattttatgaataaaaatattctgagggacaatgtataccattatgtaatgtctttcattttctttccatttaatgaagtcttgctcattcatctataatctctcttccaagggaactagaaagcagtttgtcagtttgttacttgatatttctgtgactttttgttcattagaagatttgtttgtttgtttattgttgttttagattagcaggagaactttgagtgaacaagactagattcagtctggggtaaatacctgaccagtaaggtgtaactactttccctctctgtgtttgcagtgtttcaagtgtctggtactgagttgggcacagatcctagtacttaagagatgctctttacatatttgttaaacgagtgcattttgtggcatttctttcatttgtttcttagagactttgtatgctgcccatccctagagtactggtattttgagagcctgcctgccagaggaagtgggtaacctctgcctaaagatatgagctgttaatggttaataccagaatcagataaagttattttaaagagaggaattttcctagagagaccccttcagccacatcagtgggtaacttcatactctatcatcaggccataagggagttgagaaactgagagttgcacttggtaaatagcctttgaatataatgtcctgaattatttttatttcaattcctatgcaaaaaaaagtgactggagaccttaggtctacagtgatccctactattatagacagattatggagtgtggaagctacccactggaatttccagggttttgtgtcttagagcaaggaattggaccagggacacataagacagtggcagaaagacagggagcttattaaagaagaaaagctcaagtcagagctggagaaagatcaaaggctcaaagcatgggccacggtggttgtgagtctttatgggtctttcacacagctcctgcctttcctcacatgtgtatgctatgggcttttctcagacatgttctgactgtcatgtgtattctttggtggtgaacatgggggttccagtgtttttttctgtcactgattgtaaatctctccaccctctcttctgctacaggatcaagctgtagactatttgattattaattgtattatttgggaagaccttgaaaactgccaaatgataccaaatatatcaatagctttgactttcccccccatgcctctgttatctcaaaggcccgccacagttgtggctggaagaagaggaagggtggcccctaagctgtcaaaatgcctacagcagcatcattttgtcagtcttaggtttagttggactgtagtgaggatcagatatccttttgtttaacttgtggttcccacactcagaagaggttggtatattaaagtgtataacattaatagtcatgagaaaaccaaagctgggcacaagttaaaatggcaaagacaaattttatccaggactagcataacaaaaagaacccaggtacatagttggcctctgatttaaacacactagggatacctggggatttatagtcaagaaacgtggagctcatggttgataccaacataggtgaatgttggtagcatcaacctcacaagattcatgctgaaggcaggccagcatgaatagataccaaaggtggggactgagagattttgtagatagggagggtgtgattgtgtatgtgtgggttcttgctaaactgccttggcgattgctaaacctagagtttacaaagatgtgcacacatagcacatgggccaaggagaaggttcaaagtctgactaaagtttgctttaagcaaggatctttgtcacattgcccactgtatgctagcatatttgaacagggctaggtagggtatcatacctggacccagaatttttgcaagtttctctctttctgtttgacagaaatataagttcaggccccaatgctatcttgaggatagccctgcttccatcttggtgaacctttccgttttttgtcttttgttttgttttttttttttttttttaatcctgtgacctccaacagaaaataggacaacagtttattgcacatactgtccatgaaaaaacaaaacaaaacaaaacaaaacaaaaaccaaaagaaagtttattctgaggcaactttgagtgaatagtgcttagtaacagagattcgggtttcccagaattacatgttctactgtgaaagaggtttacacgcagtcttatagccatagaacaaaagaccataaatcaatacatttgccaaatatagcggaaaggacatcggggaggtaggctacagcatagcaggaaaatctccagctgatgatactcttcttttgagcactgctgaaaagccagtcgttggctaagtttaacaatacattccaaactttttacataacaggcacaaagatcttaggtcagctacaaaggttggtaataagcagtttttttaaagaacctaaagatagtccaagataatcttggttactgatcatcatctctccgtaatggtaaagttctagacagtcagtcactttgtacagtcttcaacaaagatgtaattttcccagtaaacgtgagtttacagtagaaagaagacactaggcttgcgcttttaggggctgaatcgcctgggatggacgaagctttatgcggccgggaggggtggagttcagagaagctgcacagggccctcctcgctgcatttgtcccgccttcttcctctcattggctgagattctccacgcatcacgtcggcgaccccagcgtgccctcccggtggggcgggactttaggcgctcgaggcggggacggtgcgcacgcgcagaggagcgggtctgggtctgggcgggggaggaagggggtggtgttcccggtttcccgggttacctgagggggcgggggtgagagctcacgctggcctggcagccttggtgagtcgggattctcctgcaccggcgggcgagagcgcgcggcggaccacagagcggaggtaaagaccgcagcgggctcctttagagggtcagggtctcgacctcagcggggcatggcgggaaggtggcgggccgcccgggcggggtcgtgccgcgctaagggaacggggtggtgcccggagctcggcccggccggggttcgcttgccttctgagctctgcacagttgctgattgaggcggacccgggccccgagggctgtggcggcggcgcggaccccatagtaactttacttaccggccggctggtgcggcggacggtgtcctcagggggcgcttcacctcgggaagcgcttgtcccggaccgccgctaccctcagcctgcccggtccttcccagcaggtgacagcgggagctgacaggttcagggcgtctcacttcgcgccgcgggtccatctgtcattccccaccctggtgcttcggagtccttgctgtcccttccctgcccgtgacacctgctgcgggactctgcaaacaacccttcgtggttcgcgcgcacctctggagcggtggctgagatgctaatataatagggacgtgacccagggagatttcctctgccaccggaggccaagggttcatgatggagggttggagctcagggagtcaagaaaagtgtcctcatccaatcctcagagggataaacaaaacagcaaaacatccttgatggagagagagagagagagagagagagagagacagagacagagacagagacagagacagagacagacagacacagctcttgcttggtagttgatggtgtgagaaaaaaattttaaggtgttgactcgtgtagaacacacatttgtgttgaattctggccagtatttccttaaggatcaaattcattgtgcattttctccagggtttgtttaacaggttgatatggcacattaatttgagctttttcttcctgaaaggcatttggctggtctgcctttacttttaacttccacacctagtaaccttatactaataaagatgttggctcttagcttttattatgtagctgattggtaggggatatctgtatttacagagcattgcaagtaacttttctgctgctcgttgctgtcatccacgttgacactaacacatacagatattgagagactttggaagatagaggacgtaagggggagatgagtttctgttatttagtttccattaaaatacttcccagacaataaattgcatatagagcatatgcatttagtaaagatgtttaagtacctattgtggaccagacacgttttataaacagataaataccccctttcttgggtcatacatattctggaagaacctcagacaataagtaagaagaatatgtccttgtcagatgatgttaaaggacttagagaaaaagcagggagaagacagagccagaaacgggctgcaatttgattagaggtagttaggaaaggccttctggaaaaaaaatttgataaccggaaggaagtaaggggtgatccatgctcttttctgagggaaggatatgcagtgagaaagccacttgcaaaagccctgaggcaatagtgtggagactggagtcagaagagagctgagaggcgggtctggccgtgttggagccagttaagtaagagtcgtagagtaccaacagattaaaagggtgagagatcagattgtgaaaggctttataagcctctgtagggagaggagacctctttttgattacaagctgatataatcaaacttgattttcaaaggagccatattatgactaattggaaaatataccaccatttgggggaagggatagcagaaacagaagcagagataccaagtaatgaggccagaaatgatttaggaatttgtggctgtggtgagaggttattgactttttaatacattgtgtatagaaatgtagaggacagcaacaattttgtctttagcaagaaagatagactagaatagggaggtactgagagctttctgagaagaataggcttggtaaggaggttaggttttaggggataaaattaaacacccaagtggagattattcgtaatagacattagtgactttgcattacaggaatttttgtgtttcttgactattccagcttaaccattttgcccataagtggacaatttccattccatgcttactacttttttttcctcccagtgttgggactcaaacccagtgccttgagcatgctaggaaagttctcttactaagccctttctttctctggctctgtttttagttcttttgaaccaacgtagtcatttatgttcccaatgtagctctggttttatttgcttggatttagtccatgtgtttgttagttttagttgtagaaaaagctgtacagaattccagagtattttttatagtctgctgctatattcaacttgaacacctttctctgattttttaaaattatttttagatgcctgttaaaaagaatttaagtcccagaaatattatcaaatgtggcttttcttggccatttgtgaaattacaatgtaagtgacctgaatttttgaaatgatgttctataagcaacaaagagattattttaattcttttgttttattacagatgacttgaaataaactatcacattcttaatggagatttttaaaatatcacaatataaagtattaggccaatatactttgatctgtaaggcttgctggagcatctctgtagtcccaactacttgggaggctgaagcaggaggatcacatgttcaagaccagcctggacatttaacagattagtgggactctgtctcaaaaatgagaaaatggggttgagaatatggcatggtggtagagtactgtctggcatatacagggccctgggtttgaaaacaataacaaaatacttgtatcagaaaatatgtaatcctgaggtctattctttataataaagaaccagaaaagaactaatactttataataaattttcagcatatctgtccccaattagattggtaactgtaaactgatcgtggagtcagtgaggcaactctgttctcattggcactactttttcactgttgcttctcatcagtgcttgtccttgtgcctcttaatttccctggccttgcttataataattgagagagatatgatacattcggaatttttgaatgcttactaagtctaagcactggaaagaatagaataaggaaaaaagtacctaataacatgaaatagtaatgcttaaaaccagatgtcttgattagttaagaaagaaataaaattattttccaaaaggatagccattgtttcattcaaacgttagtctttgaaattgaaacccacagtggtgaggaaatgggagcttccagccattttaaagaaatggacaaatgagatgagcactagggtttcatgcacttagtcatgcttataaaactgtttttaccgatctttgaaaagtaaagagtcatttcaatagtggactactaattggtaattgaggaatggactataagatcatacaatgtaattatgttatgtgtagaaagctagccacccccaacacacacacacacacacacacacacacacacacacacacacaatcacagtccaacaaaaataacccactgtgtactttgtagttccatctagaaaatgtgttcttatccatagtggcagaaatgagtggtgggctgagtgcagatggagtaaaggaaggaggcatagatgggagggataacaaggacatactaggaaactgcagggagtggtagacaggttccactgaacaaattatatactttaaaggtgtacagtgtgttacgcgtcatgccaattacaccttaataagtggtatttaaaagtatctcaagctttaaaagacagaggaatcttaagttcatattacccaatgaaagaagctagtctgaaaaagttgtgtactttgttattccaagtctgagatattctggaaaaagcaaagcaaaactctgtggaggcagaggatcagaagttagagaaagggaagaataaatgggcagagaacacagaggatttttagggcagtacaatactacagtggtggatatatatcatacatttgtcaaaacctgttgtatgcacaactgtgggtcttaatgtaagctgtgactttgggacgagaatgatctgtcaatataagtttgttagtaacaaatgtacctatgctgtgggatgtttgtagccagagaggctgtgcatgtgtggagacagctatgtgtgatttcttttttctatttgattttgaggtgaacctaaaactgctctataaagagtagatttttgccagaaacttgaagaattgccattttgcttgttttgagcccgggctggctggaatttgtgatcccccttccttgaatgctgaaataaaaagtgtgcaccatcatgcccagcaagaattgactattttacattttaaaattgaagaattagaggtgaatctgagaaattgtacattgaaacatttgacaccgattctcagaaaaattatgttagattgccaactacttcatgactcatgatcagagaagaaagcattgattgctgagacccatccatttttaaagaataagtcagtgatctaacctcatgttcaccttgctaaagacagcataagaacagtatatttttttatagcatatcaccatgtgtagcctgtacatccagtatttgatttaatctttaaaagcccaccccctgaattagttcattttgaaatgaagaggagacagtgtatggaaacttaactgggaggtgcggttggccaaaggtatgtttctttaaggagtgatgtcaaggtatttgtgtggattgagggaaaggtagatcctgtaatagatgctaattgattgaaaataatatgaaagaaagggaaggtgtgggcccaggagaaaaggtaaaaagggttactcagaagaatagcaatgcatcttcctgtttgcaaaagagaaggaaataagggagtgggttgaggtagagctgagcatccagggtgctgtctcttctctacaaagcaaggttatctgatgagacagaaaaatgtgagttggagtattcttggggaagcactttacgcctagtgtattggaatttcttgtttttgtggctaattgagtccagaaaagagttcttgtgtggagatgaaggaatttaaacaagggctagtgacctaattactgagtcctgataaatattcttccaggatttgaaatcacaaatatacacagaggttaccagaatggttaaatagctttctccatgatctgctttggttaggtgaaaaagcaagtgtagtcaactgaacctgggtgagaataggaaagaagagtgtaatgaagaacctggcaagaaggacggtgtgacaccaaggaatggaggaggccggtggggtcattgttcaaagcaatgacacacagaactcctactcagttaggaggaagagccaagccaacttgaggctgatacatgcggagagtagagaaggtgaagaatcttagtgaaaaaggatatatgcttaggatttatggtagtaatggaacactagaggtggaaaagggggtacacatgaaaattctacatttaaaattccagatatagctgtctcttgtgagactatgccagggcctagcaaacacagaagtggatgctcacagtcagctattgagtggaccacagggctcccaatggaggaactagagaaagcacccaaggaactaaagggaactgcaaccctataggtggaacaacaatatgaactaagcagtaccccggagctcttgtctctagctgcatatgtatcaaaagatggcctagtcggccatcactgcaaagagaggcccattggacttgcaaactttatatgccccagtacaggggaatgccagggccaaaaaggggaagtgggtgggtnnnnnnnnnnnnnnnnnnnnnnnnnnnnnnnnnnnnnnnnnnnnnnnnnnnnnnnnnnnnnnnnnnnnnnnnnnnnnnnnnnnnnnnnnnnnnnnnnnnnnnnnnnnnnnnnnnnnnnnnnnnnnnnnttggaaatgtaaatgagctaaatacctaataaaaaatggaaaaaaatatttaaaggcaaaaaaaaaaaaaattccagacgggtaattttaagtaataaggattaaaatatagctgccgttcctgggaagccagtcttaatagtgctaatcgcaataatagtaatggtagttcttcttgtcagtagccttcctgaaggtactcaaccaagagtacctgagactgggtagcttgaaagtccttatgagcagctattaaccgagccccagaagatcagctcttgtggagaacatatgatgttgataataagtggtaatgtcctactaagaacttggccagttggtgacagctataaacgcaatcctgaagtagataccatgaaacactctggtttgggaagccctgtgaatactgacttttcccggactgaggacttggtgatgtcgtgatgtcattgagaagaagaggtgaaggtattctagcttcatagcaacaaagatagggctcagggaggagtaaagtacatggggaggggcctgaggagtcaactcagtaaagtgtctgcctcatatgtgtgagaccttaattttgatccccagaagccctgtaaaaatggtggccctagtagtatgcacttaaaattgcacctctggggaggcagagacaagaccccttgctagttgtccagtttaacctaactggtgaattctaggacagtgatataccctgtctcaaaaacgatggatgatgtttctgaggtcatgcacacatgtatatctgcacacgcacgcgcacacacacacacacacacacacatacatatatgagtatatatgtatgtatatatattcataagtaaaacaacaaaaagtatatatacatatgtatatatgtatgagtatatatctatttatattcatttattcataagtaaaacaacaaaaagttttaggaggacttacttaatagggtgcaaaacctcagaggggtgcttgagtatgtggggcagttgtacagtttgttggtcaaatagatggtattttgagaacaaagggtgtcattaatagttactcttagacataagccaggactaggctgggcaccacagtgaaggtaagcagaggcgttacactggaaaggggtagatactgagaatgagtgcgctgagtcttattagaggggcttgtgtggtgtcagctcaagactgttttctctagtgtcatggtactgtcccgagactttctgctacctcttatataagaaagtctgggctcatctttgtatgagcatttaggaagtcattaaacatgtaggtgatagttgaaacctcagaagtttgagttcataaaaggatagtaaacacacagagtaaaatgaggagggtacaatccagagcctcatcaacacgaggagctgacacagaagaatctagccaaggacaatagacagtaatcagaagaggaaacccgcaaaatataagtagaagtatgtgtatgagtatgtatgtgattccataggtcagaagagagggttaagaacaggacaattattgtttttcatatgctttgtattttacagagaggtctgatcagataagtactagtacgtgcttgttggaatgaatttggcaattagttattgttgctcttggcctgagtagtttctatagaggactgtgagcaaaagccaggttgcagtgcacagagcagaggtgaagtggcttccttatagacacttttgagtaatcttgaaggagaggtgtcaatgggatacttcctctgttttaaatgcaagcaatgaagaagctaatagagttgagggattaaaaactaagagggagctgggagatgtcaagtcagaaagtgttgattgtcattacaaaggcagaagaaagaggaaaatatgttctgttgttttgggcttttttgagatagggttttgctttgtagcctaggctaacctcactcatactcacaatcctagttgcttatcttttttctgttctgagattcactgcacctggcttggaagattaaaaaaaaaagatttaaatatgtatgcgtgctaggaaccaaacttgggtttgcaagagcaacaagtgctcttaacctgtgagccctcgatccagctcctgggagatgtgttctaaataaataagacaagcttactaattacaagtgtcaagccctacagtgcttggaagcattcagtttccatctcgtgtcgattaactctacttggattttcttgtactgcttttagctatgagctatccaaacgattgttggggtgcttgatattttctggggctttttttcctttatatgtatctcttttttaaaagttagctgtgttttgtacattggagatgtcttatgattaaagatagccatccatatttacataccacaaacagaattaaatccgtatgtttttaatgtattgcgacttttcaaaagcagtaagaatattctttaacattgatctggtcacctgtgacttgctgcagtttttattggttctatagttatcttcactccttagaagaacagtagtcataattacattcattgtattgtagcagcagagctattaaatacattgagtttgggtgagtgtaaaattaagacagtggtaagaacagtttcttcccttttttatcataataatgtgacatctttaaaagggcagcaaacatatttatcagttcataaaatgcactcattgttgtaacctcttggtattcatccattgaagtgggaaatacagtgtggccagtggaaggaggctgtcctggtgtaacttgtagggcagctatgcatgtccatcagctccctcattacactgctttcttttttttttttttcccattttttattaggtatttagctcatttacatttccaatgctataccaaaagtcccccatacccacccacccccactcccctacccacccactccccctttttggccctggcattcccctgtactggggcatataaagttggcgtgtccaatgggcctctctttccagtgatggccgactaggccatcttttgatacatatgcagctagagtcaagagctccggggtactggttagttcataatgttgttccacctatagggttgcagatccctttagctccttgggtactttctctagctcctccattgggagccctgtgatccatccattagctgactgtgagcatccacttctgtgtttgctaggccccggcatagtctcacaatatctgggtcctttcgataaaatcttgctagattacactgctttctatatttgctcttgactgcattttgactgtgtgtgtatgtgtgtttaggccagcagactttcttcaggtgaggtgtatctgttatttaaatttctcagtggccctggaactatcggattaggccaggccgtttggccattgagccccagggtccacttgtcttcacctccccagtactgagattatgtgcatataccaccatgcccagcttgcttgctttctttctttctttctttctttctttnnnnnnnnnnnnnnnnnnnnnnnnnnnnnnnnnnnnnnnnnnnnnnnnnnnnnnnnnnnnnnnnnnnnnnnnnnnnnnnnnnnnnnnnnnnnnnnnnnnnnnnnnnnnnnnnnnnnnnnnnnnnnnnnnnnnnnnnnnnnnnnnnnnnnnnnnnnnnnnnnnnnnnnnnnnnnnnnnnnnnnnnnnnnnnnnnnnnnnnnnnnnnnnnnnnnnnnnnnnnnnnnnnnnnnnnnnnnnnnnnnnnnnnnnnnnnnnnnnnnnnnnnnnnnnnnnnnnnnnnnnnnnnnnnnnnnnnnnnnnnnnnnnnnnnnnnnnnnnnnnnnnnnnnnnnnnnnnnnnnnnnnnnnnnnnnnnnnnnnnnnnnnnnnnnnnnnnnnnnnnnnnnnnnnnnnnnnnnnctgtatagccctggctgtcctggaactcactctgtagaccagactggcctcgaactcagaaatctgcctgcctctgcctcccaagtgctgggattaaaggcatgcatcgccactgcctggctgggatttcttaaagattaaaatgctttgttgctttttgtatttccttttaatggtgtttccaaaacaataatgctgataattattcctgcattttctcctgttaactttatttaaatgtttcgaagactatttttaaagtcatttgtttcaagttactggcatagtcttctctattccttatattttacattataatttatgtgtgtctgagagaaagcatgtctgtgtgtctgtctgtaggcacgagtcatggaggttagagaacaactttcaggagtctgttctctccttctactatgtaggttctgggaagtgaattcaagttgtcgggtttggtagcaagcacttttacccactgaaccatctcactggttcactattattattgtttgtatgtatgtgagcctgagtcagtgtaagtgcaacacatatgtgatggtgcccacaagatcagaataggtgttagatcccctggagctggagtgaaaagctgccgtgagcctcctgatatatgtgctgggaacagaaactgggtcctctgcaagagccgcaagtgcccttaactaccaagttaactttccagccccactcctcattttttttttaaataaaatactagcaatgttgttttggcagtgtaatctggttttactcacattaaggaaacaatgtaaatggatcttcatgcttgttacatttcttttttaattagtgtactgtcatgaaagttcacagtccaaagagacatttagaaatgatctagttttaatttttctgaatataagagtaatagggaacaggctgggattaataacatatacctagttctggggactcaggagtaataggggacaggctgggattcaaaacatatacctagttctggggactcaggagtaataggggacaggctgggattcataacatatacctagttctagggactcaggaggctggatcaggagcgccctaagtttggagtgacctaggctgattagttagaccctgtttcaaaacaaactgacaaaccaacatcaagccaacacttagaaagcgagggtgggggtcataaatatttgaggaaaaacaaaagttcaaaaatatcttttatttttagtctgacatttcatacactgtattactaataccctgaacatttttgtgtgttttaggaatgtaattctgtagccaaaatatgtctgagtaccataggaacatgtagcaattggcttctagtatgtgattcatgaatatttttatttttctttatatgttattcttgtttttgttgttgttgttattatagaaggtgtctcactagccctggctagcctagaattcacttgaggcatatttcatgttttaacctaagtgctagaattgcacacgcgtgtcaccatgctgagcttacctgtccatattctttgtgtgtgtgttttattagatattttccttatttccatttcaaatgttatcccctttcttcgtttcccttccaaaattcccctatcccttccctcctgcccctgctcaccaacccacccactcctgcttcctggtcctggcctttccctacactggagcatcaagcctttacaggaccaacggcctctcctccctttgatgaccaacaaggccacatatgctacatatgcggctggagccatgggtccctccatgtgtactctttggttggtggtttagtccctgggagctctgggggtactggttggtttatattgttgtttctcctatggggctgcaaaccccttcagctccttgggtcctttttctagctcctccattggggactctgtgctcagtccaatggttggctgagagcgtccacctctgtatttgtcaggcactggcagagcctctcaggagacagctatatcaggctcctgtcagcaagctcttgttggcattgacaacagtgtctgggtttagagactgtatatgggatggatccccaggtggggcagtctctggatggcctttccttcagtctctgctccacattcttaacatagggatagaaacttattgtgatgatgagagtgggttacatttgaaaagtctttcttttctcagaaaatgttccatttttgcttcagttctcccagaccctgtgttagacttaggacccctaactagtcctcttcatggatggttagagagcagttgattcaacagctgcatcttgatttgactctactcttagctttcttggagtaaaatataacaagaaacagatttttctatatttgactgtatcaactaaatttatgttttcttttaaggggtagctagttgtattgtctatgtagacatggaagactaagaggagaccagcactgtttaaacttccaaggtgtagtctaggttgtctttaatctcatcatggtgctgtgtgactctctaagactgtagatttgagcctcctacctgacttacaaggtatctttaaggcttgtgaatatctatgtttagtattcctagaccttattttatagaatcttttgcatatgtcagaaaaacataaaacttgatcactatgattttgttatagaaattattattttcacttacattaggtttaggcttcaaatgactttttaatgtttcttcaacaagtatgaagagctatgcctataatagaagtttaagaactttttaaaaagcctgtagtctttgaattataatctttaatataacataaatgatacatcaactttcttccattaattaatttatttgttcactttgcatcccgatcacaaccccccttccacctccccccaccacgccccttctgcttctcctctgagaaggagagcccctcctgggtcccaaccaaccctggcacatcaagacactgcaggactggtcatagcctctttcactgaggtcatctaggtagcccagttaggggaacaggatccataggcaacagagtcaaagacatccacttgttgggggacccacatgaagaccaagctgcacatatgtggcacgtgtatgtgtgtgaggagcctaggtccagccctcatatgctcttttgttgttgattcagtctctgggagttcccaaatgacccggtttgttgactctgttggtctttctgtagagttcctgttcactctgggaccctcaatccttctccccaactcttccacacaactccctgaattccatctgtttggttttgggtctgtgcttctgttttggttagctactaggtggccagatatctggaatgggggatgagacgaggaaagttataagatgtctatgggaatgactctagctgaaactcctagcggtgggagctatggagcctgatatgacctcctcctgtagtcaggtaggactcccagtggagagacaaggacaccaacccattcacaaaaccttcaacccaaaatttgtcttgcctatgaaaactgcaaggacaatgatggagcagagactgaggggatggccaaagtgactggtccaacttgagacccaatccatggacaaaaagaactaatccatggcactattttttttttttttttttggtttttcgagacagggtttctctatatagccctggctgtcttggaactcactttgtagaccaggctggcctcgaactcagaaatctgcctgcctctgcctcccgagtgctgggattaaaggcatgcaccacctcgcccggctccctggcactattaatgatactctgttatgcttacagtcaggaacctagaatgactatcctcccagaggctccactcagctgctgacaatatcaacttttaatcctaaggtttttttttttaaagataataaactttgctaaggactttaagagtttgtgtagcacatttcttagtacttcacagctaactgtggaacaggaaaagtcttttctaagttcatattagagccttagcttgggaaagtttttaaaaaaaatttgcacatttaagtactttctatcaaagttaacattaagtgagttggtatttattgacttcttactgtttatagcattgatgatattttttaaaaataagatctggattaaaaaaaatctttaacaaagatttaattaaatttaagttttgcctgcatgcatatctgtgtacaacatgtatgcagtgcttgaagaaaccagaagaagatgtcaaatcctttggaacaggagttaacagatggtggtaaggtactgtgtaggtactgggatttgaacccaggtcctctggaagagcaaccagtattcctaaccaccctctagggtcccttcctaagaaagtataatttagtttgtaaagaaagaatacaagtatatgatacagtgtgatgaatgatactataaaggcatttagaaaaggaattactagtgatttccatggcaagagcaacatgataaagcagtgaactagtgtggaggacgtgtaacctttggggaagaactgtagaggaagtggtcctgtgtgttagttgtatagagagattggaatgataaaatggtggaggatattgcatgctctaagaaaggtattggggtcacatatcccatgaattagagtgtggtttataatttcaaggaacctgagtgactttttttttttaaagcagttgtaagatttaggttagatagaaaacagaccagaggcaggagatgagggcccaggagtgcttagaaataaagctagagaagaaggggccagattcagtgatgataataatagctaataattactaatcttcagtctgccaggtatttgtgttctgaatggaatgtctcatttaattttaataataactcttcctaaaagcttgcctatataagaaacaagggatctcttgggaagaaaaatgagctcaccccaaattattgatgttgactccctgaaatatagaaggaaaagaaaatttagggcccattgctttcttagatttctgccctctatacaaaattattctaaatatatttagctaagcgtttttttttttgaacagcccacactgttccacataacttaaaagtatttcattaaacacgttttctattttgacttaatttaaatgcataatacagaataaatgtgggagcagcaccaccatttctttcccctttcacttcttgaggattggcatagctccacatttgtaatgttgaccatctaggtcacagccaacttttttttttttttttttttttttttttttcgagacaggatttctctgtgtagccctggctgtcctggaactcactttgtagaccaggctggcctcgaactcagaaatccgcctgcctctgcctcccaagtcacagccaacttttataaagctctgagatgctgacattctagtgacacctcatgttaagatgtaaattctttctgtgaggagtagtatcctctcaggtcacatacttgtttgtataaaagaaaaacagaacataagagaagtaataacaagttgacacattttttttctataaaagagagagagagagagaagagagacaaaagagaaagagagagagaagagagagaataaagaaattgaaagctagggtagcaggaaacttgtgatgtgtagggcctagctacacgtaggtctagacctgccctgcctaaattgcttgatagttacccttctgaaagacatgggtatgagaagtctccctgaaattcatgcaatatcaggaaaaacatgagataagaatctttacacccagcttttaagctcagccttagctaatcttagatacacaaactgtagataaattgtttgccagaatgtaacatgaactgcctctagtctaattcttcatagagtcctcattcttatttgaaacctcatgagtttggccttcactgtcccattcttgttactctgtgctccccaccagaatgactcattaagctttgcttatactattctagatagtttctaacctacagctcccaaatttccagttcttataaatcactgccaaaggcttaagaaccacatgtttgggcttagacacaacaaaaactccacttcactggtatcagttttctctgttaattttgcagagctgtgaccaaaataacccaagagaaaaatctacaggaggaagggttttggcttacagattcagactgttcaatctatggttgcatggtcccatgtgcttgagtagaagatcttaacagtggcagtatgcgacaaaggagatatagacaaagaaatagataaattatcattataaagtaaaaatttaaaaactgcctatgttattaaaagtgtgcaaatgtaatgtgctttctgttttgaaatctttggttggaaatctgatggctgttagcacatcaagcatttgtcagaaagttacactgcagctcatatatcaacagatgccctgttgcttatatgattcaatttaattgatatgatttaactgaattatttttaaagagacatttgggctgggggatggctcagtgtataccatttttgatatacaagcttgaggacctgtgttaagataactggtcctaagctgggcagtggtggcgcacacttttaatcccagcacttgggaggcagaggcaggtggatttctgagttggaggccagcctggtctacagagtgagttccaggacagccagagctacacagagaaaccctgtcttgaaaaaaacaaaacagaacaaaacaaaacaaaacaaaacaaaacaaagctaaacaaaacaaattcctggttcctacataaaaaagtggacatagcaatgcactggagtgaggggtttgagataggaggatggccagtgagtctggccacttggtgagttgtacattcagagagaggtatgagggaaagagagaagaaaaggagagaaggggagaaagcgggaaataggggaaagaggtaaggaagggagaggagggggaagtggggaggaccctgtctcaaaaataaggcagagagcaagattaagatacttgatactgacctctgacttccacaagcctgcatatatatacacatggaaataataaatttcacagcagagagtcctgtctatgacttgaatgaaacagttgaggctatcattcttgaactgccttgattcttagctactacctggtaagtttgccatatctacaccttctaatctctttcctgtggcatcagacaatggtgtaatgcttcttgctctttgccctgagcctggcctctttacctgtactcttagcccaattatcacttattttctctgacttttggctttcattcattccttctcttgctcccatctttgatggttttccccttgtggatacattggtatgtcaataaatgggctctttgggggggaaaagaaaacaaatgaacaagaccctgatatgggcctgtggtatgttttagtgggaacatgcccttggctttgcgttcaatctccagaagccatgtgaaggtggaaggagagaagcagcctcaaaaagttgtcctctgaatccacacatgtccccacctctattatttattcacatagacaacgattaaacaaaatttaaactttgtataacattttgttctttctcatgtgtaaatactcttactatgactgaactgcctgggagaagggccaggcagagccagttaaatatatctagctgtaccaccaggtgttgcttccttagaacctaaaaatatgactggcttcccaaaagttttcaaacaaaaatgagatccattatttttaaatatgacaaaaacctttcttggcctgtggcctctctttgtagcatccccctatattttcttttttcctagtcttgttttctcaaaaaaaaatgatctgcatttatactatttccttattttaccctgtgttggaaactgtgagtagagctgacaaggttgttttaagaagttttagggttgaaatatacagcataatgaattttgtcttagtagttactgaaagaaattcatcactggcctaatggttagagtcatagctcacttatcacgtgtgttttggccctggcagccattctgcacatatgtcttagctcttctgctctttgatgcccaggtggcaacacaagcagctcaggcagctgctgagagagtttttctgactccctttctctcctcatcaaaattatgctcttgtaacccttaataaacatttattataattgtacacttctactattgcttaggagaaaaggtctcacctttttcttgaaatattacagcagtcttcaaattggtttacattacgctattttttttcctgaactcttgcttctactttgatacaagagtgatctatctgtccaacatttactgtgttattctatatttaaagttagtcctgggctttctattaggcctgttcaccagaatctcttaggaagcttgttaaatgggtttctgttgggccatcttcagcttaggggattgaagtctttgaaggtgtaacattggagagtgtatgggtgattctgagacccactagctagtaggttaagttcttggtataatgccaaaagtcttctgattttcaccttctactccatcctcctttcccctgtattctaatgataattaatataattataattacaatatccaacagtataatgtcctcagtgacttaactggaactgcttcctgtctgtaatacttttttccctcacttttgtccatcttctacttaaagctcctttagcttaaagatcacctctttcaggaagctttctggactcaaatttgggtcaggtgcccttaacagtttaaaggatcctcaatcctggctttcctttgtcagtgtatcatgagctttttgtggtagagacagatttttgtgcatgtgtgttttatattcctttttacatgttatttttaaattacatttatttatttgtatatgttggcgatgtgtatcccatgacacatgcatccaagtcagaggacaacttgctggagtcagttccttccttctaccttgtgagttcctggaatcaaacttaggtcatcaagtttggtggcaagcacctttacctactgagccattttgctgacccagtgttttgtattcttaatccagtaccaactagatgttctgtaattataaacaggaagaacatggaaccaggctggtgtgttaaattagttcttgtcactgacaaatgagacaaataatttaaaggagaaagatttatttgtgtttgtggtgtcttatgtctcacttgatggttatctggtttcattgcttttgttcctgaggtaaggcagaaaatcgtgccagtaggatcatattagagaaaggctatttactttgtagtaactaggaagcagaggtaacaggaaggggtcagtgccaagatacctactttaggggcatatcctcagcaacccacttcctccagctagctctgccttctacaatttgtttttacctcctgattgtcattgaaccttgactgtatcagtggattgaaccagtgattgggtcagaaccctccagatccaattctctctggaaaacgcctcagatatactcagaagttctggtctcacagttcaataaaattgccaagattagccaccacagctgggatacagcaaattgaggtatggggttcaggcacatgagaaatgacttagcaggtagaagcatttgccacatgagcctcatgacctgaattcaatccttagaatgcttgtaaaggtagaaagagaactgactgtacacaattgtcctctgacctctacatatatgccatgggatgtgtgcatacatggtttggatgagaatgattgccataggctcatatttgaatacttggttcttgattgatgaaactgtttggaaagaagaggtatggacttgagagaggagatacgtcactgggggtcagagtagggaggtgagctttgaagttggagaagaccataccattcctagttagcactctttctgcctcctgcttgtggatcagatataagctgctagattctgttcctgggccatgcctgcctgcctactgccatactcctagtcgtgatggccatgggctcaccctttgaaaccgtaagccccaagaaacttgtctgtaagttgccttggtcatagtgtcacttagcaacaatagaaaaataacaaaggcatatgttcaaatacaataataataaaattaaaataaaaaataagtttgtaaggtttaaagaaaatataaataagatgccatggatatagactctggaaacaaaagtaatcatatagcagtcatagtgtttttaatggaacaactggaaatacatgaaggacaaagagataggaaaataaatgaggcaaatagactgattttaaaatagcatgtgcagaaggaagaaggatatgaaaccatataatattcataaacaagactcaaaaacacattctacaaataaattgttaacaaactgaccctgtaattgaattcaaagaataagaaaaagttctcagcttccattcttcgttttctctgactaggagagaatgatctgtaggccgactaatgaagatgaaagtaagaaacataaaagaaaattgaagcccaaggcaagagaggagatctaggacctctggctagtctagatgaattcacacctcatggtcagattccatgcagatttgttaatgttttggctaaactggtaatctttgaggaattgcaataaacatgaaaacttgtaagaagctgtggaagtgcagtgtttgaaaatttaagggaatgcagattccatagattttagtgaacttgacattattcccacaaaattctagagatgatcttaaaatattggtagatatttacacacaggaaaggcgagcagtaatgtgcctcagttctctacgaagaattcattccagataatatagctcaccctgccccctttgatggcaggtacagctacagctgtactgtatctagatttctgtgggatgttgactgagttattgctgcactgttcactagtggtgtggcctgcacctactccctaattctcacaaagatatgtgtactcttgcatgatttcttgttcattcctgtctgttttatttcccagagcttataataatgtgtgatcaagactgtgcaccaagatactcaaggcagtctttaagtctttggattttaagtattttcaaatagttgaaaatcacttttattttttattccttgttattaaaaataaagcccgtaactaatgaagaaacattttctcatgtcttataggtaaaactagagctaaactatacagatagataaacagaaacatcttatcaccctgaagcacaaaatttcccttagcattctgaaggagctttcattgtattatacacagaaaactttgagtttcatttcaagaattcaaacaaaacaaggaatttgagaatatgaattttggtgggaatttatcattatttggttttggtattttgagttctcctatatcttcaaataccattcaccctgctaggagagtaataaattggctgtctgtaagaacattgagctatatatgggtgatagtctaccattccctcgatttccctgtttagaagactgatacttgtctcattctcctttgtggttaatttgtctcttatctggaagtaggagttggaaaagaaagagtgctgtgatgaagtttatagctctatattccaggatttctttcttgaagactcagttcttagagctaggcatttattctttattttacttttttttttaattaagaatttccaaattgtggacactttgcctcttcttagaattgggaacaaaacacccatggaaggagttacagagacaaagtttggagctgtgtcaaaaggatggaccatctagagcctgccttatccagggttccatcccataatcagcttccaaacgctgacaccattgcatatactagcaagattttgctgaaaggacccagatatagctgtctcttgtgagactatgccggggcctagcaaacacagaagtggatgctcacagtcagctattggatggatcacagggccccaatggaggagctagagaaagtacccaaggagctaaaggggtctgcaaccctataggtagaacaacattatgaactaaccagtaccccggagctcttgactctagctgcatatgtatcaaaagatggcctagtcggccatcactggaaagagaggcccattggacacgcaaactttatatgccccagtccaggggaacgccagggccaaaaaatgggagtgggtgagtaggggagtgggtgggaaggtatgcttttggtatagcattggaaatgtaaatgaggaaaatacctaataaaaagtatatatataaaaaagaaagttaaaaaaaagagtttcatgtatgcatatattgttttgatcagttccacactctattccctcctttccaactcctcccttatctgcaccactcctattccctatgctcagttttcatatgccctgtttttctctcttttttaaaatcccagagtcacttagtgttgccagtgtacatagatgtggagccctctgctggagcataggaaacctcttaggtgctgcatccctgaggcaaagtgactgagcctcctagcagtcatcattgcctgtaactcttcaggggaggagcttcctgaccacctcccctcttcatgctggggttttgtctgcattgatcttgtgtaggtcttgattattcagtcacagccactgtcagtttctctgtgaaactttcctgttgtattgtggaaaacgctgttttactataggcatctgttgcttctggttctcacaatctctctatctccttcctacatccctgagtcttgggaggaagggtgtgatacagatgtcccatttgtggctgaacaatccgcaatctcatattctttgcatattgaccagttatgggtccctgtgctaaattactgtctactacaagcttctctgattccagttgagagatgcactaatttaggagttggtgctctctgtgctagatgtgtagctttgcctcattctcagcttgggtggtcgggtggggttgcccattgggtagtactccctgtataaggtgtggggctctgcccctttcccaggtggcaggttattaggggtcagcaggtgagtgggtaggcaaagctacctgtgaggtggttctcagaggtcctctgctggctaggatttctgtggttttgggattacaaataattaattgactgttacttgtatcacatacaaaaacaggctactgatttttttatcagaactttattaacattatttgattattattgccactgatgtatttgtatcttcttcttataggtgaagccttatgctgagacagttttatctagttcatgaacccaaattatatacaagctgaatgttacagaagtgctgaaagactggtgagtaacataataaatattaacagttagaagacttgagtcaggtaaaattttggagctatatagttaaagtagacagattcttcctaggaaagtgtatatgcagattgctgtgatttagtatagcacatactgctaggcgattcaaagcagcggctgtcaactatgagtcataagcccttggggttgatgaccctttctaggagctgcatatcacatatcctgcatatcagacatttatatttatgattcctaacagtagcaaaattatagttatgaagtagcaacagaaatcatttcatagttaggagctgttaataaaggttgagaaccactggtttaaaggaaagaaaataatattaacaggaaaagtgcttataaatacctacgacacactttctatataaaagttttatgtagtaaatattttcatagccgtaaacatgtatacactataaaaacatggatggtaatgataagtatcagccggtgtgggtgtaggtttcctgtgatgtaatcgtggttcctgtgcacacacatatgtatattcacaaacttaactcaatatcatcagtgctaccatttacaaattctgggtgttggctacaatctcatgttacagatcttttaaaaaatgcttgtgtgtagtttatgtgtatcctttgtatttgtgctcacattatgtttctgtatacttttctgagtatgtgaaatattggaaaagtttaagaaaaatatgtggttgtcttttcagttgattctcagaatggatggaaaatattcaagtatatcgaacatttaacttgggaagtaatgtacacaatgtacaacatagaaatagaaaaacctttagtgccatattagtgttgtgctctatttgtgttaatgtgattaggatggaccttttgtaagaatattgcatagaatttataactttggcattttgtagatagtggtaacttgttgcccagcatagtaattatagtcagtgatgatatattatattcttttaaagtgtaaaaccatgggccttagtgttctcataagtgtagcataattaaactcactaattaacttgatttaaccagtccagagtgtgtgtaagtagatatatgtgtatttaaaatcttgtgttacatgcaataactaaaattttgtcagattaaaaaaaaagcaagagagctaatgtgaaaaaaagctgttacatgtatgaatgtttttcttgtatttatgtgtgtgcaccatgtgcatgcctgctgcctgcagaggccagaagagggtgtcagacccctaggaactgcagttacagaaggttcttagctgtcatgtgggttctgggaactaaacttaggttctctgcaagagcatcaactattctttttttgtcttttattagatattttctttatttacatttcaaaaaatttcccctttccaggtctcccctctgggaaccccctatcccgtctcccctccccctgcctctatgaaggtgcccccactcacctacccagtcccgccttcctgccctgacatccccctacaccggggcatcgaacccccacaggaccaagggccgctcttcccactgatgtccaacaaggccatcctctgccacatacacggccagagccatgggtccctccatgtgcagcaactattcttaagtgctaagccttctccagccttccaaattacttctgaccatagataaagctattctgaaattctttgaatatacatttgtgattttgttttctgaatgtttatacattttccctctatattcatccctgtgtgttttaccttgctgttttccttaatcttaaatgccatattgccttttatttggctaaaagtggcaaaagctcagcagctgaatttctgcactcacctgacaggaaccaccacttccagcactgactaagtggtttctggagggtagacagtgacggcattgtatcaagaggaaaactctgtgttgtattttatcctatagcttaatatttatttattttcattttatgtgcatgagtatcttttctgcacacatgtgtgtgtttgtgtgtgtgtgtgtgtgtgtgtgtgtgtgtgtgtgtgtattcaagttgggtgtggtagcacatgccagaaggagaccttgaatcccctggaactggagttacaaggcagttgtaagttgccatatggattctaggactgaatctaggtcctctgcaggaacagcaagggttcttaaccactaagccatttctgcaacctccagtttatattgttaaaagagccatttatctgttttaaacatgtaaagcaagaaccctttcctaagtaatggtttattatgtaagagagaaagtcagaccctccctgaactgccactgctcactagtgtcttctcccacgcagtgtcatttatgtctgcctactgtgtttaggtgtttcaaacctggtactagcactgtcataggaattacctaataaggtcagagctattcctgagaatagtagagagctaggaactgaaatatagcagttttaagtaagtctacagaaatcacatatattaaaaggtaaatgtacatttttttttaaaattctcatatcctgttcattttatagctctgtcatgagcacggacagcaactcattggcacgtgagtttctgattgatgtcaaccagctttgcaatgcagtggtccagagggcagaagccagggaagaagaagaagaggagacacacatggcaactcttggacagtaccttgtccatggacgaggatttctgttacttaccaaactaaattctatcattgatcaggtaacgtcatatcagacaattgttcatcagtatgttactgttggtcatcgattagtaacttcctgatttcatacttcctcagaatctctttgtgttaaagtgattgacacattatgtatctttcacattactccaacaacaaaaaaatagccctatttgtgaaaatattatttatttggatactttaaaaactgaaacatattacaatttcaaatggccatttttctaaacaggttttgtatataggctttttgtagttgatttgaacacatcagtcataaactacaagtcaccaatattacattgttaatacattaaggaaataaatagaagcacttcccttcggtgtcatttaaccaaaatcaaggccagatttagattctctacatagacatgttctctatgtcttccaccctttgtctattgcatgagtatgaatctgtgactgcctaaagtttgtcttgtgaatctgtctgtgtctgtgtgtgctgtccctagctgtgtgcctgtccctaacaaagggttttgttctgtcttcattgaacatcacagaaggcatcccatggggaaggaatgagggatgctttactgaaatctttaacagggttttacaagggtttaagtatagactggttgaccccaactgacccagataacaaacaaacagcactacagacatcattgtttatcaggtaataccccaatgttgagttcagcatttatggtggttattcattttacaagattgctttcaagttgggtgtggtggtggcacatgccttaatcctagttctcagaagtcagaggtaggcagatgtctgagtttaaggccagcctgatctacctaataagttcctatacagccagggctgttataccaagaaaccctgtctcagaaacaacaacaacaataacaacacaactcaccctccaaaacaacaaaaacaaaaaactaaatcaaaacaaaagattgctttcaacttctatatttgctgctttcagcaagtgattattagagcatgcacacattgttttgaatcacgggcatggaagagtgcacaatttaagattacaactatgcattagcttatatgcattataaaagtcgattatatgagaaattcaagcaaataaagttgaatgttaaataattttcttaaaggcagaaaaccaacatgttgagtacatggtatgtcttaatgagggtttccatgactgtgaagagacaccatgaccaagtcaactcttataaaggaaaacatttagctggggctggcttacagtgtcagaggtttagtccattatcatcatggtggcagacatgacaccgtccaggcagatatggtggtggagaaggagctaagaattctacatcttgatctacagatagcagaaggagactgtataccacacagggtgtagcttgagcgtagatcacaaagcccattcccacacctactccaacaaggccatacctcttaattgtgccaatcccaatgggccaagcatttaaacataggaatctatggaggccatacctgtccaaaccaccacagagtagaataacagttttgttttgttttgagacaggatttccctatgtagtcctggatttcttagaattcactgtatagaccagagaggcctcaaatccatagaaacttgtcctcctctgcctcccaagtgctaagattaaagacatacaccactacatcctggtccactcttaaatcttaggtgacttcaaggtatattattaactctggctgaggttcagcaaaagatctagtcttataaaatggaagaaacattttcttaataatgcatctccatagcttttgacttttaatagcatgagattaccatgcttattcatagaaacataggattatgattcaaaagaggaatttatgtttttagtaaaaatcagaatgcagttttagaagtttaatgtgaattagatacatttttctttttcttttttcttcactcaatccttttcctcctcctctcctcagctcccaagttattagaaacaaggttttagatctcacaatataacccaggccagcctagaactcttgatcctcctacctgagttccctggtactaggagtataggagtataggtatagacaccatatctagcttctctttttaaagatactatataaatagcaacagaaatatatttaaccaagcccactcagtcaacaggttctccagcatgggagtgaggattaaaaagaaaaagacagaccacattgtagcatgaccccagtcaattctgaaactggagtcaaatttaattttcccaatccgctttttataccattttaattacatgcaagtattaagggcaagcagtacaataaagaaataacaaggcagtaagcaaagtccggggattactgccgtgacagttgtttaaaagtgcttgtcataatgaccaaaatacttgagcccacttcccagtccaagcccaaaatcttgcccgaagcctacttcttttgttgcaccctaagattaaaattcctgccttaccctacttcctttttatagcctaaagttagattcttactgaaacttacttccttatcctgccttaatgccagattcctgcctgagctcatgttcctgtcatggcctatgtcagattcctcctggaagcccatttccttgtccttggccaatgtcagactcctggcaagcggtaccccaaaaggcccttcatatatattcatcaataaatctaataaaagaatataatacttttgcatagaattctataaaacattattataagaaaccatgggatatttaattaagtagaaaatgattcaatttccatgtgttcaaagaatcatactgtaaaggtatatatttctctaaattgacctataccttccagtatagtcccaatcaaaatctctggcttttcaactaattctgttatgcagatgtaatttattacagtctttgtccattccatatgcaaaattcagttgtgttttagacactcagaaatatgtccatcatcaccagagccaattttagaacaccctcattatctcaaaaagaaagctgtagtctagccatccttttccaccctcctcttagccctaagctaccactaatctgcttttcatggctgtagattttactttcccttataatccacaaaatatcctttaatgtattatttaaatgcctaaaatcatctaagtcataatagcaacaatagtttttctagtagtgttttgttatattttagaattagacatctaaatgaatttgaaatggtaacattatgctttgattaaattattttatgttttgcctacatacatgtctgtgtactgtgtatgtgccttgtacccacagaggccagaagagggtgtcagatgacctgacactgtagtaacagatggttgtgaacaccatgtgtgtaatggaaatgaacccagatcctttagaaaggagcttgtgcatttcactgctgagccatccttccagtcccatagcttatcattttatttgtatttcactgacaactaaatatgatgagctttttttcccttataagctcaaaagcatactttttgtgagtctgttcgagttatatgtcctttttaaggctaggctatctgtttattatccagcataacagttattatgaagtgttggattgtaaatatgatagatccctttgtgaaataacctttgatttgtagctaaaggactaaaattactcaacctttaaatgcaataataattttttatctcttcttcctacctagtcaccttttggaatatttaaagcaatgacagtagggacattagatgctgtctttggagttcagacaaagtgtggacactttgccctttcttagaagtgggaacaaaacacccatggaaggagttacagagacaaagtttggagctgagacgaaaggatggaccatctagagactgccatatgcagggatccatcccataatcagcctccaaacgctgacaccattgcatacactagcaagattttgctgaaaggacccagatgtagctgtctcttgtgaggctatgctggggcctagcaaacacagaagtggatgctcacagtcagctattggatgggtcacacggcccccaatggaggagctagagaaagtacccaaggagctaaagggatctgcaaccctataggtggaacaacaatatgaactaaccagtaccccggagctcttgactctagctgcatatgtatcaaaagatggcctagtcggccgtcagtggaaagagaggcccattggtcatgcagactttatatgcctcagtacaggggaatgccagggccaagaagtgggagtgtggggggagagggtatgggggacttttgggatagcattggaaatgtaaatgaagaaaatacctaataaaaaaataaaaataaaaaaatagactttatctatatttggttgtttgagagagtaagtggagaatgaccatttgagtccttaagggaaattagttgaacaagatgtctcttaagatggaatcccactaaatacaaaactgcacattgtagagcagacttcagcttttgtatgagtagggtcattttttgagtatttgggggaaggggtgacttacaccctttttcctccactatagacctatagtaatattgctttactaatatttattattaagaattaagtagactctttattgagatagaatcaacaaagtaaatgtgcgtatgtaaactatataggtggatgaattttgtcgcgggtttattatgtccctacaagcactgtcacactcagtgctccaccatgggttttcagacagcctctgccagctgcccactgtgaggtaactgctgcgtggattgctggcatctgagtgtaattctgtgatcacagtttgccctcttgtgactgagcttgttgaatccatgctcttgcatcagtcagtcagtcatgtttgtttatttgtttctgattagtgttttgttgtaccacagtttaactgttcgcctgttgctcagccatttagattgtatgcatttggttattatgaataaaactgctgtggacattcttataagtctttctgtgtttatatctttcattgggcatggaaattacaggtgaaaggacagttatttgtgcaactttgtaagaacctgcaagttgttttcagtggttgagccatttttcaaaaatgttcattagctttgtatgagaattttagttgttctatatatagcttctctaaaatttatgacaccatccttctagtattagccatttttaagtgagcatgaaaactttattcctgacaactaaggatgttgactattttttagttacatacacacacacacacacacatatgtatatacatacatacatacatacatatatattatatatgtacgtgtgtgtatgtgtcattacacacatacacacatatgtatatacatacatatatatatattatatatgtacgtgtgtgtgtatgtgtgtgtgtgtgtaatgactactcttttctgcaagagatatgtgtgctatgacactggatgtggtagttagtactaaactgtatatatataatttcctgtcctacatgtagatatctatgatgaagtgtagtatataaacttagcacagtaaaagataaataataattgataaaataattccaaaattgataaaattgtggaaatgtgctttaataaaagttatttcaattttatgagttatttctggaatttcttttattgtagtaactaactgtgggtaaccaaaaccatggaaagtgaaactggaaaagggggggcgggctcttgtacgttgttttatgaatgtctaagtttattccattttgaaggcccatttttttgtcatccagtacagttcttcatgtattagaggtagaagtctttgttagcatgcaaatattttctttgtgacaatccccttcactcccctacccgttcctctctcttcttgtcttatcttctctttgctttcttttcttccttccttccttattttggttttttttttttttttaaagatagggtttcaataggcagtccatgcctgcctctaattctccattctcctttctaggcttattcagtactagagttacagagctatgtgccattgtacctggctgtcttttcattgttaagtgttcttctgttgttcctaagtgctagggatcaaacccagggcctcttgaatgttaggaaaatactaatccactgagctatatccccagccttaacagtgtcttcagaaaatggagttctcttttgcagtggtactttctgttctaatattttatatcttacaaccctaaagttgtaatatattgacctactttaaaagctattttaattcatgtgtttatttaattttaatgtagtgttggggcttaaagccagagtcttatgaatacaagataagcattctacctagaaagcaatattctcagccttcctaactgtttagtcttgtttttaccttatatctgtgatgtacttagagttactatttgggtagagagtgaggtaggtggtacagttcttacacttttcttccacacacgttacagtgtcttcttcagagccttttcttacctagctgaaagtattggtgatgttggaaacataacgctacagaggagtcagagacccaaatacactatgttcatggtctgggagaagtcaggagagtcagtgctttccaaattaactatgtatttagtggttcctatctgtactttctgttctggtcactactttgttgtcttttctcgcaccaacacccactgacttgattactgtgatttttaataaaagtaaatccagtaagatggtatggtgggtcaaggtccttgccaccaagcctaatgacctggattcaacccttagaacacacatgatggaaagatatccttttatcttcacacatgtgccatagcataagtaccaccagtcaaataaataggtaaataaataaataaataaatgtttttaaaaaagtaaattcagaaatcgatcttgtaagttctccgattttattctatctcatcagcaatgcccattctgggtcctgtaggtttccatatagatttcatgcagtttgtcgtttccataacagtgctcagtgtgctttcacttgggatggtgttgaatctgtaaatcagcttggaaagaattggcactattggcttctcccagtccatgaagatggtataaatcgattaatttgggtcttttctgatttctctgaagtgttatgttttcagtatagagaccatgtatttttttaattaaattttattcccttttgatgttattgcaaatgttatttaaaatgtaattttcctgtttgttgtttatagaaatagagttgcttttcttgaatattgatgccatatcctgtgcctttgttaaattcatttactagatctccattttttttttctgtaagctcctaagcactttttgtgttagcaaccatgccatttataagtaatgacagtttcgttctttttcagtttttataccttaaaaattttctggactgtcttctacatagaggcagatggaaatggtgggtgagagtggacttatagcttctgggtgtaacctaagggggaagtatgggtgttttcattgaatgtggtttgagtttcttagttgcctttgatcagggtgaggacattttctcctattctcagttcactgagaagtcatagccttgatggatgctgagttacagaaaatgccttttctacatctgttgagatgtatcattgtctttcctttcaattctttagtgggggtgaagtacacagatggtttactgttgaactatgtttgcatttctatgatgagccccatttgttaatgatttattatgcataaccattttaatgtatttaataggctattcattttaaatggcaaaagatctttttaatggttaatatgacagattttaactttatattcatatatatatatatatatatatatatatacaatacatacatacatacatacatacatacatatatgtgtgtacatacaagataggaggacctaattggatttgtaggttttcacctactctaagggcctgaaatcattttattctatgtgagtaattgactaatccttggtctctaggacccttgacttcatataatgacagatttttttttttaactgggggtggggacaaagacttttttttttctccttcatacttttaggtgaatctggtagcatttccattttctaaaaaaagagtttgatacaagtcaatattgtatgttgaacatatttccccatattttctctacccttcttttttctttcctcctgcagtgtttcttagtataattttctttgaaataatgggtttcttaagaatcttactgggattccctcagtatttctaaagctatatctataactatttttgagacaaacctttctgtaaaatgactatataaagtctgttggaaaagcttctaaatgattcttaggagtaatcttgtctagatgatagtacttagtgttacctaccttagatctttctgaagctttatcagagactgttgtggacatttaacaaccatgctctgtgcaggagagtgatggggagagaatagggacagtctagaaaaaaactgcagcttgaaggtcaaatcttctgtcagtgaactattttgatattgctcatgacgaagactagtttgtaatattttaaaaagagttattaaaagaaagagaaaaatatgtgacagagatcttacatgatgcacaaagcctgaaatatttactgtctgatcacatacaaaatacattttcaattcctggtcaattcaagaactatcaatataatatctggcatcagtggaaactggtatacaactactctgagatgttaaatatttgacaaggctgtattgtagctcagagagagagagagagagagaggtgcaggcttagaagaagaagactttggtatttgcagaactactcaatttgaaaacctctttaccaaaattctaaaagccaattgagaataattttttttatttatataaaaagagtagaagagtgtctgcgtttggtagctgattatgggatggatccccaggtggggcagtctctggatggtccatcctttcgtctcagctccaaactttgactctataactccttccatgggtattttgttccctattctaaggagggacgaagtatccacactttggtcttccttcttgattttcatgtggtctgtaaattgtatcttgggtattctaagtttctgggctaatatccacttatcagtgagtgcatatcatgtgtgttcttttgtgattgggttacctcactcaggatgataccctgtagatccatccatttgcctaagaatttcataaattcatttttttaatagctgagtagtactccattgtataaacataccacattttctgtatccattcctctgttgagggacatctgggttctttccagcttctggctattataaataaggctgctatgaacatagtggagcatgtgtccttcttaccggttgggacatcttctgaatatatgcccaggagaggtattgctggatcttctggtagtactatgtccaattttctgaagaaccgccagactgatttccagagtggttgtacaagcttgcagtccactaacaatggaggagtactattgcatatgccagcaagattttgctgaaaggactctgatatagctgtctcttgtgaggctatgccagtgcctggaaaatacagaagtgggtgctcacagtcatctattggatggaacacagggctcccagtggaggagctagagaaaatacccaaggagttgaaggggtctgcaaccctataggtggaacaacaatatgaactaaccagtaccctcagagctcgtatctctagctgcatatgtatcagaagatggcctagtcagccatcattgggaagagaggccccttggtcttgcaaactttatatgcctcagtacaggggaatgccagggccaagaagtgggagtgggtgggtaggggagcagggcggggggagggtatgggggacttttgggatggcatttgaaatgtaaatgaagaaattatctaataaaaaattgaaaaaaaagaatagaagaaccagtaatatttttaatgagatctacacaggaccattacaagtagaactctttattcctattcctacttgatatcttgttttattattgttttttttcccccttgagacaggatttcttatgtagtcctagctatcctgagacttgctatataggtcaagctgacctcaaattcagagatcctcttgcgtcttcctcccaagtgctgggattaaagacatatgtcaccatgcctagcaataccttgtgttaaagaaatgcactagtcaagtggatttttaaagtgtactactagctttgagtatgatggcaccatctgtaattttagcacatggaccaccaatataagagtatcactgtgagctccaggccgtcagagtgagtttgaaattacatctgggttatatagtaaagccctgtctataacaaacaagcaaacagacatagtaacaaataaatggggacggaaaaatactgtttttcaaagtgatatgtacagaaatgaaaacaacctcaggaaatcttttttagcaaagctaaaaaaaaaaaaaaaaaaaaaaaccaaaccaaaccaaacagtacttattaacagacttgttaagtttccattagctcagtagctgtacagttagggaatggaaaaaaaaagattagataatcctaatgaagaaatattttttatgtgtacaatacatatatattagaataaaattcttagagaagaaatgaagaatagcaatgtgttatgctgttaggatattttgtttttacatttggaaatttaagtttaattagaatacctagacactatttgtaatcccattgaataactgcagtaattttgcattactttctggctggcattcatattccttgctatgtcagacattccgtgaaagtctccactgatgcctacctttgagcctcctagatatgtgtctgggctgggatctcagcctttccttgactcgcttgttcttcctccttctcctgtcactgtggctactggatgtctctatagaaacagctgtgcctgatacctggcaagtacttgtaacatgcttcttcaactcaattcagaaagggacacctcagtgagaacgatttcattatttattgttgctagggggaaaatgtaaaggcatgatctaagtgtaagtgttacgtaagggaaggtatgatataaactcacttctgcatgttaggtcatggaaaaaccttggaatggctctgtgcatggcatgtgtgggtgtggcatgtatggatctggtattaaggaacaacccttatttctaatactatatctattgtgcatacttaggatttggggagatagaattacggttccatttgaaagaactgaaagcctactttcccagtgtaccatcaaataaaagaaaaatatttatggatttcaaagaacagaattacatgaggagtttctcttaagaccagaaaggataaaaaccaaacaaacaagcaaaaaaccaaaccaaaccaaaccaaaccaaaccaaaccaaaccaaaccaaaccaaaataagaatatatggctggcactttaaaaagtaatagaatcagggctagtgaggtggctcagtggctcagtgggtaaagttgattgcaagagaagtgtgtgctaggtttgctctccagaacttattcatgtgaaggtggaaggagagaaacaactcctcacatctagacatatactatggtatctgcacacacaaaaacacatacaataactacaataacattattattattagggagagctacaccaaaaataagttgttttagaaatacagtaattgtatgaaataaaaaattgttgcattcagctgctagtgtatcccttttctccaccagggactgttctagcatagcagggtcaggccccaaaggtctgtacttgctgccgtctcatccttttcaagggtttgtggtctataagtctatggtgaactgaggggaacaggagcctcacagaatagatattgctggagctgggctttgtatggtggttccagagcgtgcagagcagcaggcggggcaggaatgtctgttcacatagcagtgatggtttgccagtgtactgttagagagcaagaactcactcaccaggacagtttgttcccttagaatattgtgcggccatccactaaagactcaaacttggacaactctgaaggattaacgagctaaaaagctatttacttttagactaggaatctttctttaactcctttgactctgcagctgaaacaggtcctaagcctctcatcattacatttcactccattaaagctgtgattgtgaatgctaccagctccctccagctgcttaaggcttttcagccatcttacacagctcagaaaggccagcttgcatcctgtgaatgccattcctttcactgctctcttctgtggtgtctctgacttcacatctctgtaccagtctggttgtcaatctgctcaataggcttccttcagcactgcccacccttacttccttgaagactcttagagctcagaatcccattgtcatcagttctctcatcattctgcttgctctctggaaacccttacttatgtcctagacatccacccaagtgattttcatagcttacgtagacagattacattagggagagctacctcatatatatacacacacacatatatatatatacatacatacatacatacatacatatatatacatacaaacaaatatgttatatataattataattaaataactatatattatacataatataacatctccatttagacacattaatgtctcagattatatatgtctaaaaaatgcatctgggccagtgagatggcttaggtagaggcatttgctgctaagcctaacagtacattcattaaataaataacatataattaaaaagattaagtcactccatcatctttagcctaacttagtatccctcttagattttctttcttggtggagatatttttggcacctagttacctaagccagaaacctgtgaggagttttttcctcacttgtacatcattgaaaattaactatgagccatttcagttctactgtatagtttctcatatgtctgtgtgtctgtttgttgtggggtcactttgtaatcattgtggccctgctgttaacattggctgttcctacttaccccagttctgccttgaaaatcttgccttaccttgcttccttccccaaggaatggtatgagaaggaataagccctggcttaactgttcattaaatactgggccactcatgtcgcaagtgtcccagcaatagctgtctagttgcagtccttcttcaacacttctgatgattgttcttattttctgaactcctaaactgaataccagttccatactaaaatttagttcaatactagggagatactatatgttttctactgtcctgtcttgtgtgtatgtattttatggtccaaatagagaccttttccaacatgggtcgtttacttcaaaaagaataatagagtgtgaaattaatatatttaattatcttcactgataaatcttttcatatgtattattaattttgctttcttttaaaatttgttttttattttttatatttaactacatgaagacttaaattttgtagtaactttgttattaattaatagcttataggatttaattttttagttttacttaacaagtctgttttttttatagtgaggaattcttgcaatgcgcatggtgtcagtagcagctcttcttgaagtattagtgagaatgtgctaaataccatcacataatcttacattcttctgtggtcagaaatgcttataaattgaaaagggtccacagtttgacttggacttcaaataggttaatttgatcctcggttttcaaatgtaacctttttttttaaggaaaaattttgtttttgtttcagttaaatgtaggatgttaggaattaatgtgtcttggggccgtagaacatgaaagacttgtgtttctgacacaggccctgacatgcagagaagaactcctgactcttcttctgtcgctccttcccttggtgtggaagatacctgtccaggaacagcaggcaacaggtaagtcctttttcacaggtcacctgcattatcaagtcccgatgggaaaagaagttcattggcaaagctacttttgcctgatgagttaccgcagcttcagctgcagagcagtagatgctgtagggatatttttattatgtatctggtatgaaaatacattaggcaagaacatttttatttcttctagtaatataaaaactgtgatgcttcttagaggcttacacaaatgacaaatgcaaaatacatgaagaagcagagtacttagcgaaagaagttactaggtacgctgcattaggaagatgggtggtgaagactttgaagaaacaaattacagctctttgcttaaagactgctgtcgacagtattttctttagttcaatttttctaattttgcttttgaagtcatatgttgtttcaaggctaaatagaattatgaggtcaataggtaattttaattttgttttttatattttgttttagtttggttttagttttggttttggttttttgatgcatggtttctttgtgtagtcctggctgtcctggaacttgctctgtagaccaggctggccttgaactcagagatcggcctgcctctgcctcccaagtgctgagattaaaggcatttgccaccattgttcagttttcatttttgattttggtaactatgcatgtataagcacatgagcctttaagtacttcagtggaaatataaacaggtttctccctggtttccccctaaattcagattctcctggtttaaaattatctttttgtgtcatatttttcttgcttatacttcaatgcatatctgacatagagctctttttttcttattttaatatttatagttcaaatgttatctccttttacagtcccccctccacagcctcacccccaccccatcctcattccgcattgcctctaagnnnnnnnnnnnnnnnnnnnnnnnnnnnnnnnnnnnnnnnnnnnnnnnnnnnnnnnntccaactcccatctcacccctctgacatccccctttctctggggcttcacgcctccacagaaccaagcgcatccccccctaatgagaacagacaaggcagtcatacggaccagcccagtatactctttggttggtggcttagtccctgggagctctgaggggttcggttacttgatattgttgttcttcctatggggctgcaatctccttcagctccttcagtctttccctcaactgagcccatatctatctactgggaattggtctcttcaggttccatctccccacttttagggattttggctgagatcatccccactgggcctctcatgtccctggtgtctgggactttctagaggttctccccatccctcaccccacactgctgcatatttctattcattctccgggccctctgggcttctctcccatttccctccatacctgatcctgccccctcttttttccctcctcttcccctcttctatccaggtccctccctccctctgcctcctgagggattgaagcatccacaattgggccttccttcttgttaaactttaattggtctgtgagttgtatcatgggtattctgaactttttggctaatatccacttataagtgagtacataccatgcatgtccttttgggtctgggttacctcattcaagatgatattttctagtttcatccatttgcctgaaaaattcattgtttttaatagctgagtagtattccattgtgtaaatgaacctcattttctgtattcattcttcagttgagggacatctaggttgtttccagcttctggctattacaattaagtctgctgtgaacttagtggaacatgtgtccttgtgatatggtgtagcatcttttgggtatatgcctaggaatggtacagctggatcttcaggtagaactatttccaattttatgaatcaaggcatacagctcttttaaggaagatatttaaagacttctaatatattttcctgattatttattgatccagtaacttgcttattttttatgtgcagaattaaaaatttttcaatcacttgagaaagttgatttatgccatttgtgggaagttgatttcattgctggcatgttatattttggtggaattggtcccttttaatatttgctcttatctgctttgttttccctctcctaaataaagtataagattctattaacctgtattaattctatttattcctctgttttgtataactccattttgtatagactgcagtaaatattattgcaaagggaaagatgcatttagttcgatcctttctttaagaaatgaccactgaatgctgccccgagctctgagggctaaggatggactgctgttctctacacctggctgatgtaggcaacaaggccctatagaaataactcttacagctctcactgtgagtctggcctccagaattttcctgcaaggctgttttccttgttacatctctcagtaacgtcagcctgcagttatcctttaaatctcaagtccgggtgccattaaacctaccatttatccttgtcttgatgaatacttgctgtgtacttaagattttgaattatatgggtgaatattgaagttctgagacactataaactactctatgtcttaattttaacattactaaagatttctaaatggtgagcacagcaactggataacccagagtctcatattttgaaatcacaatgcaatatataggttcaacttaggtctactttcctaactcttccttgctattttcaaatcagtttgtatcccctgagctaattccacttggcattgagaattaaaaagataagtgtggggagaagtgacccagagatgcaactagggaaagcagccttgaagggaaattatgccaggccagactcatgccggttgtgagtcattgcctgtgtgtttaacagttactaacctaagacttctttcttgatttcattagattttaacctgccactgtcatctgatataatcctgaccaaagaaaagaactcaagtttgcaaaaatcaactcagggaaaattatatttagaaggaagtgctccatctggtcaggtttctgcaaaagtaaacctttttcgaaaaatcaggcgacagcgtaaaagtacccatcgttattctgtaagagatgcaagaaagacacagctctccacctctgactccgaaggcaactcagatgaaaagagtacggttgtgagtaaacacaggaggctccacgcgctgccacggttcctgacgcagtctcctaaggaaggccacctcgtagccaaacctgacccctctgccaccaaagaacaggtcctttctgacaccatgtctgtggaaaactccagagaagtcattctgagacaggattcaaatggtgacatattaagtgagccagctgctttgtctattctcagtaacatgaataattctccttttgacttatgtcatgttttgttatctctattggaaaaagtttgtaagtttgacattgctttgaatcataattcttccctagcactcagtgtagtacccacactgactgagttcctagcaggctttggggactgctgtaaccagagtgacactttggagggacaactggtttctgcaggttggacagaagagccggtagctttggttcaacggatgctctttcgaaccgtgctgcaccttatgtcagtagacgttagcactgcagaggcaatgccagaaagtcttaggaaaaatttgactgaattgcttagggcagctttaaaaattagagcttgcttggaaaagcagcctgagcctttctccccgagacaaaagaaaacactacaggaggtccaggagggctttgtattttccaagtatcgtcaccgagcccttctactacctgagcttctggaaggagttctacagctcctcatctcttgtcttcagagtgcagcttcaaatcccttttacttcagtcaagccatggatttagttcaagaatttatccagcaccaaggatttaatctctttgaaacagcagttcttcagatggaatggctgctttcaagggacggtgttccttcagaagctgcagaacatttgaaagctctgataaacagtgtaataaaaataatgagtactgtgaaaaaggtgaaatcagagcaacttcatcattccatgtgcacaaggaaaagacaccggcgttgtgagtattcccacttcatgcagcaccaccgcgatctttcagggctcctggtttcagcttttaaaaatcagctttctaaaagcccctttgaagagaccgcagagggagatgtgcagtatccagagcgctgctgctgcatcgccgtgtgcgctcaccagtgcttgcgcttgctgcagcaggtttccctgagcaccacgtgtgtccagatcctatcaggtgtacacagtgttggaatctgttgttgtatggatcctaagtctgtgatcgtccctttactgcatgcttttaagttgccagcactgaaagctttccagcagcatatactgaatgtcctgagcaaacttcttttggatcagttaggaggagcagagctatcaccgagaattaaaaaagcagcttgcaacatctgtactgtggactctgaccaactggctaagttaggagagacactgcaaggcaccttgtgtggtgctggtcctacctccggcttgcccagtccttcctaccgatttcaggggatcctgcccagcagcggctctgaagacttgctgtggaagtgggatgcattagaggcttatcagagctttgtctttcaagaagacagattacataacattcagattgcaaatcacatttgtaatttaatccagaaaggcaatgtagttgttcagtggaaattgtataattatatctttaatcctgtgctccaaagaggagttgaattagtacatcattgtcaacagctaagcattccttcagctcagactcacatgtgtagccaactgaaacagtatttgcctcaggaagtgcttcagatttatttaaaaactctacctgtcctacttaaatccaggtttgtatgtgtgtatatgttttacagttgaatgagtgcttttgaacacgggatgaaatgtgtatatttgaatttctgacctccagggactcaaccatagtataatcatagtaactgtattgctatcaagaactttagtttgtcaacaacaacaaaaaaaaacaaaacacccttcccatgtcttttttaaaattggatattttatttatttacatttcagatgttatccccttttccggtttcccctccacaaaccccctatcccatcctaactcacctcccatgccatttttaaacattattttaattaacttttctggaggtagttagaggacagaagctagagacattgatttttagcttctcagtgtgtgtgtgtgtgggggggggcggtgaaatatatttttggttatatttctgaaggaaagaaatgtgtgagacaaagatatctaagaaaaggccagtttaaatgaatggttttgtatttataatgtagattgcatattaaagtccattaaaatgtttataaagatcatgttaggacaggaaaagagcttgtattattttatgagtagcacataaagcttaaagtagtatttatgtatttatgaccgtgtaaaatttgcacatacatgaactattgggttcctgagtcagtggcagcaggagatactttcttaaatgccacagtcatgtttattactcagacagagtagaaaatacagataagcaaaaagaaagtctaaattgtattttatcaatgaattttccaatttttgtgattgttaattttggagcagttaagattgttaacttgggaagtcctgagcagagtgttagagaaccaagggagcaagtgaagggaatatatacctgccctcccagtgatgatttgatatttagaatttctatgaaatttattatttgaagacaaagttcttttttgagttgcgtcttttaatgtgatatatatatataatatatgtatatatatatatatatatatatatatatatatatatatataatttctttttaagtacttccagagctgtatatgagcatataagtgctattacaaagtaacttgagatcttgatcagtatcttagaactatcaaataatgaaccagagtaggcagtgtttggtgtatataccacacacagcaatagcatgtttacataacatatttacctatttataaatgtttcagtatgtcatataaaaatctttttttcctctctcacagggtaataagagatttgtttttaagttgtaatggagtaaaccaaataattgaactaaattacttagatgggattcgaagtcattccctgaaagcatttgaaactctgattgtcagcctaggggaacaacagaaagatgctgcagttctagacgtcgatgggttagacatccaacaggagttgccgtccttaagtgtgggtccttctcttcataagcagcaagcttcttcagattctccttgcagtctcaggaagttttatgccagcctcagagagcctgatccaaaaaaacgaaagaccattcaccaggatgttcacataaacaccataaacctcttcctctgtgtggcttttctatgtgtcagtaaagaagcagactctgatagggagtctgccaatgagtcagaagatacttctggctatgacagcactgccagtgagccattaagtcacatgctaccatgtctgtctcttgagaacgttgtcttaccttcccctgaatgtttgcaccatgcagcagacatttggtccatgtgtcgttggatctacatgttgaactcagtcttccagaaacaatttcacaggcttggtggtttccaagtgtgccatgaattaatatttatgataatccagaaactattcagaagtcatacagaggatcaaggaagaaggcagggagaaatgagtagaaatgaaaaccaagagctaatcaggatatcttaccccgagctgacactgaagggagatgtatcatctgcaacagcaccagacctgggatttctgagaaagagtgctgacagcgtgcgtggattccagtcacagcctgtgcttcccacaagtgcagagcagattgtggctactgaatctgttcctggggaacgaaaggcatttatgagtcaacaaagtgagacttctctccagagcatacgacttttggagtctctcctggccatttgtcttcatagtgccagagcctgtcaacagaagatggaattggagctaccgtctcaggtgatactttgtacttagtccgtctcacataacatatatgtgtattatatgtactgcatgtacatataataatatataatatacatgttctaacttaacactgtctattttgccacaaatgttaaatttattttcaagtattaattacatataaaactggaaatcataatgacagttttatgtatatagtgtatttatatcaatttaccctccttgccttctctttcttccctcccactcatccccttccttatcccagctagtttcctttctatttcatatttgttgttgttgttgtttgggctgtgtgtgtgtgtaaaagcccactacattgtattagggtttcttgttaaatcctagatgaagaattatttaccagagcacgagttcctcgccagtggttatatcacaggagaaaaatgtctttcccttccccaggaaccattcactccttagaggttctaaaagggctgggcctcaggagctctttcccttgctaccattgtctgcctattaaatgcacagggaagggaggggaagggcctcagggccctccgcacttccatttgctacctactttgtttttagaaaacccttttgtgcttaccagaataccaagtatggaggacacaagggacacacagttcctactcgaaagaagcttactgtttaattttctgcaaaagcccctttaggagagtttgtgaattcagtgttaaatgagtagttgaggtcattttgttttagagtttagaagttcataatcttggtgttactgttgggaactctgcccatattttctgacctttgtttatggttttgttgtggttatcatctggtctgtacctatttgttttactttttagacttggcattccttcaaagaaagataaggttttttgttttttaatctactgttatagagagctaggcaagcgtaatagcttcattcaaagggtagaactgaaggcaaaagaaaaaataattagaactgcttcttagaatcttagagaacctttaagaataaggaatttgtaaactctagagataactaatattctgaagtttcaaagaatgacttggtaaaaatttaagatttatttatttttatatgtatgctattttgcgtggacatatgtctgtacactatgtgtgcaaagtgtctggggaggtcaaaagagagggtattggattccatggaactgcagttacaaacagttgtgtgctgccataaaagtgttggaaatggaattttggtcctctgcaaggactcttaaccactgagccatctccccagcctccaaaaagtggaattatatttttttcaagacagggtttctctgtgtagtgctggctgttctgaaacttgctctgtagaccaggctggcctgaactcagagatccacctgattctgcctcatatgtgctaggattaaaggcttttattaccaccaccctgctaagagtggattttttatgattaaacagaattttaacagtacattatttggataagaactcagatttttttttttttgcagtcagtttaccttcatattaattacaaataaatggatttttccctgcttcttgtaatcctttctgtcacttttaaaatgtgtgttattgatattcttagtctttcattttaccttagggcttgtctgtggaaaatatattgtgtgaactgagggaacacctttcccagtcaaaggtggcagaaacagaattagcaaagcctttatttgatgccctgcttcgagtagccctggggaatcattcagcagatttgggccctggtgatgctgtgactgagaaggtatgaatccatgtgctgtgttcttaggtctggttagcagaaacgggtgcttgttgggtgggaccagggcattgatttaaatcacaggaacatgaattttgatcaggtgaattccttggttggttaatttctccatcatctggaagggataataaataaatcatcaattgtcctgcttcaaagaaaagcagttaatctaacctggaaatttgttgataactgttcccaataagacaagctatattaaggtttgataatattactgatattctttttttccctaaaacatttcaaatctaaacagaaacaatatagttgcctcctcagtatcaacactctcctctcctctctccgttccctgtgtttctttactgaagtatttttaaaggagatcctggtttgtagcagctgataatctattaaatgatgactcaggaatagtgatatttagataccttgtctgtcttgtcttgttgtattggtataacagaactctctactgactttaattttaaattgctcaacaaaaatgactaacactcatatagagggtgacattagaaattttgagttctgttaacattttttaaagtaactaattttaattttttcccctgaaactcatttccctgaaacttaaaaagtttccctaaaaactttactgttatgcttcttttactttgggttaactattgttaattttcttctttacataccttcttttttaacctgatctgattactaagttttttttcttttgaataaaatattgagagagttcttaaagtgacttttgcatggtaagtagtccgttaactgagaaaaagagtcagtgctgcagtgttgactttgaattacactggccttatagagtcatccctctgaggaagagctgttgtcccagcccggagatttttcagaagaagctgaggattctcagtgttgtagtttgaaacttctgggtgaggaagaaggctatgaagcggatagtgaaagcaatcctgaggatgttgacacccaagacgatggtaagatgtctctgatgcttgtgattggactgccagttaaactgtaaacaaacaaaaggttcatcctgcctgtacattgtggccttacagttgcaaaaaggcatcgtgttatcatttcgttttgtcatcgcaacaaatctgaaatatataatgttaacagtgacatcaagactaggaagatagcgtaaagccccaggtatgattgatcccttgcactgtaaggacgaaaccaaaccaaaccaaacccccttgtctaaaccaagtagatgcccaagaataaagatgaaggagaaactttttcttttatatgcaagtaagaaaggagatacccagaagtagatactacaaggaaaagcaggtgatgtgcctacagagatgtgtctgggcagggaaactttctgaagaggtgatatgtacattggactctcattgtcagtcagtgacatcccatgggtgatagatgcagcagttcctttgttgttttctgtaaccagccagttcttagggtggaattgtgttgcatgggatcctttgtgctggctatgcaggttggatagaatgtaaatgatggcctcttgcttgttttatgtcaacttgacacaagctgtcacttgagtgtttattcagtgatgtgggtgtgagggtcagctcactgtgggtgccgctcttggataggtagttctgtgatagataagaaaacaggctatagaaattagggggagcaagccagtaagcagcacttctctatggcacttctctatggcttctgcttccgttccagctttcaggttcctgcctttgagttctagccttgacttcctcagcactgatgtatgacctgagaattgtaagatgaaataaactctttccttcccaagttgctttttatagtggtattttgttacagtaatagaaaccctacctcagattattcgaggcacaagagttctaggaaggctctatcttttcagatactgacctttgggccttctcagcacttgcagttgaagtttacagcagtttattcttgcttgctagaagttgattttctcttgtgtgtggagggaatggggataatcactgattttagggttgaaaggtatctatgattttttaaaaaaattttttgacttaatggtagttttatcataacctagatataatctacaaaggaaaatttcctttgtgtgttttgtttttgagacaaggtctcaccatgtagctctggaactcactttgtagaccaagctagcctccaacccacagagacccagctattctgcctccccaatgctgggactagaggcatgtacctctctctatgccaggctttttgccttagcttttaagcgttagtttacttattattatttttgtgtgaatattcgtgatatgggtgacaaatacattgtgccatggtgaatgtttggccagaggacaactttgtgaagtcagttctcgccttccacctatccatgggcttcagggtccaaacttaggttgttgctaaggctttcatggtgagcgcctttgcccactgagtcttcttacctgtctcctagatcttgttttttgagacagtctctactgcaccttgctgattctgttaagctggctggccagtgaactccagggagtcccttgtcctaggcctggtggtactgattcttggcacagagcccagctttttgcatggatgctaagaacctgaactcatgcaaagtgcagcaagcactttcctcccagcccttggatgaacagttttcaaagagtacagcagaccattttgaggtcagtcagtaacacagtcataaagcagacagtgtttagaattcaacaaatcaagcctacgattaccacagaaataggggcagataaaataaacttcattctgatttaaatactttgggatcagaaagtttgagataagattttccagttgcaacaaaagaatgttaaatttgtatcagatgtttatgaaattttctgttggtaatatttgtggtttcattgagaagcaaaattactttcaaaattaaactacccataagacttcattgttcaagctttaatcaacggtaatgctgcaaggcaaggctttgtgagcatcttcatagaaggaggactgtttttgttgaatgttctaagtgatgagttagggctgaaatattcatatttgggaataaaaacgttctttttctttactttgtcaggagtagaattaaatcctgaagcagaaggtttcagtggatcgattgtttcaaacaacttacttgaaaacctcactcacggggaaataatataccctgagatttgcatgctgggattaaatttgctttctgctagcaaagctaaacttgatgtgcttgctcatgtgtttgagagctttctgaaaattgtcaggcagaaggaaaagaacatttctctcctcatacaacaggtaaaggatgtcctgtgttgaatcagtacttatactcatgttccaattcttcttcttatgtttaacccagtgattttctaaagccatctaatcctatacttctcaaatgagtagcatgaaattattactgtcattagctaaacagtaatgtattctgagagcagatcttaaaacttgtatttaatcctataacagtattttttgagtcatttaaaaacacacacgcagacacacacactctctctttctctctttctctctcatacacacacatgcacacacatgtgcacatgtatacacatagactcttatgaaataaattattatgacattacagttatattatgcgtatatgaagtcaaatgttttaattttgtatgtttcactctttaatcttcagggaactgtgaaaatccttctaggcgggttcttgaatattttaacacaaactaactctgatttccaaggtgagttgaacctggtttaaggaaataactttgtaattattgtgctgttgtgtgaagaattaattgtgtcttccactaacacactgctccatggtttccaaattgtttttatgtgtatcgtcctgtttgttcctcatgctcactcagtgaaatatattgagtagaggggcagaatgttgataacaaggcctgcagtaagttgttcagtagctttgtgagggcagtaacctgctctcggcactgctctcggcactgctctcggcactgctctcggcactgctctcggcactgctctcggcactgctctcggcactgctctcggcactgtactaatgctttatctggtgttctctcctcttagttctttctcagacatttgagaaatttgtgatgagagagaatgtgatttctgcccacaaattataaattatagttctaaattatacatctaaattatacttgatggttaagacgagtaaatgtgaaatgttaatttggatttttgttatgcttccttcctccaagttaatttcaagttacacatttttgtcaggaatacccaatattagtgttaagtcctctagaggacaaaatatcaaaggctttgtgatggctgtgtcttattattagggatgttaattttaaccatttcaggtaaagatagtctataggtttttctctattgtaagttgcaagtatgtcatgggtgtcaacttgaaagtatgtaaatttcacttttctcatatttcagcccacagtttttatcatctattggtgatcatgcatgaaaagggtagtactgtaatatttgctaaatagtgattttgtacttttggcattctttgtacgtttatgaattgggattttactataaggaaaaggatttttcccctccatttacttagttagtgcatgaatatattgctcttatgttacactcttacatttaacactggtgtgacacgttaaagttcacaaacctctgtcagcacattactactacactcgtaccatacgcagttgttcctaaggcactacctaacatccttttcttattcctaaagagcccttccctcccaggatacattacaactaattgtcatatttccttgcttttgttgttaggccttttatgtcaaacctagggaagacgggtctatgatcccaaagatttaccatttctaaacattattttcttctctccatattctttgctctttgttttcttacatatgagttgtaatattgggctgtgaaggttgatcctgccttgtatcttatctcatgtacttctcttcttttatgctgcattcaagaagactttaaaagttctattccattggggctggagagagaaagtgctcagtggttttaagatcactcacttcttatttgaaggtcttaagttcaattcctagcaaccacacagcagctcacaactgtctgatgtcctcttcttttatgcagatgtacatgcatacaaaatacccacatacataaaataaataaagaaatatgcatgtcaaacattttaaaagcaattatatcccaaaattttattcatttttaaaattatggtagctgcccaatgtctttgttccttttcagttgctgtgatgaaacactattaccagggcaatttatagaagaaagcatctctctctctctctctctctctttctccttttttttttttttaaagaaagcatttaatggaggcttacagtttctaagggtgaaaccatggctttcatgacagggagcatggcagttggcaggcaggcatggtcctggagcagtagccaagagctttcatgtgatccataagtaagaggcaagggagagagaaagagggagggagaggaatagagagagagggagaaagggagagagagggagagaggtggggtggggagaactgggaaaggtatgggatattaaaatctcaaaacccacccctagtgacatgtttcttccaacaaggccacacctcctaatccttctcaaacagttccacctaacatatgaccctaccaaggccattttcactgaaaccaccacacctattttatagttatgagtccttttgcttgattattttctgtctttaaaaaattattatttgtgtgtatccatttgcacactcacactgaaacctgtccattttgaacttttaagaaaaatctaaacacattttggctgtgctactttcttcttcaaaaccctttcagggacttccattaattacctgcagggcgaaggccaggccaacttatggtatccttgtaagtggtcctttcagaaacactttctcttacactatcctgtctgctcattgccttcatgaaacaggttacttaaaaggggtctctagtcttaaacctcccatcttttaagatacatctcaggttttacagcagtattgtttttgtcatgtctgctttatagagaataatttatgttttctgttttggagtgaggagcagcagaaacatacatgaacaaatatacttgaaacactgttaaaacaatctattataataattattactttatggagtttttatgaattagtgtaccattgcttatactttatgctaaactctctagtagatgaaaatgatcaaacaatacagcttgtgatatttatataatcttttctattttacgtctgtcacttaagttccatgtaagatatagtagttataacctgaacaattgccgttttattagtgttagttcatctacctttagttatcttgctatttcttcagcagtttttgtgattactaactgttgtttataatcattcagtatatgattatagttttgtacttctttaaatgaaatttgattattctcttcctttaattttattcttctttttcaactttagcatgccagagagtactggtggatctcttggtatctttgatgagctcaagaacgtgttcagaagacttaactcttcttttgagaatatttctggagaaatctccttgtacagtaattatgctagaatttttatattttcactaattccttaatataatgtattttcactaatttgtgaaccatcagctcttgctattgtaattactatttagcccagtaccatgttttatgtttgacatattcagctatagtatctgtatatatcttgattttactttgatttggattaacaagatgcctttagccctatgtcaactccagcctttgtgcttgagaaatgctgtgattttaattactaaagaaaatttaattatgaatcgcaacaaccatcccagatgtttcctttctctaaagaatcattatctgttctttagttgagtattctacttcccaatgctatagcctaatggctcttagcagggaacccatttttgtaaagcagtcttgattggaagagtctacaaatgaatcacaaaacctcgaggctgtgtgaagaaggatgaacaatagctctgtcctccactgcccgcctcaccacccacctcagtctccagtccccatggaagctctgtgaataccagtgtgggtcatttgagagattggctgtatgatagattatttcttttttaaattaagtgtacattttaatattacatcttttaccttttttgtattccatttaaacaaaaaacttataattatgatgagtaaaaccgtaaaacattacctcaattcaccaaaatcaaatgaaagaaatttttcttggccagggggaaaaacaagtgaaacaataataatagttattactgttgttatataattacgaaattgttattgttaattgagtgtgaacattcaaatttatgtaattgatcattgtataatatcatttaggaatctggagaatttgtaaggttgtattcgtcatttgaaaatacttgagttataggactggaaagatgcctcagtggttagagtgcttgctgctcagtcatgcagacctgagttcagatcccagtcgctatgcagggcagcttacaaacccctgcaactacagctccaagggatctgagcctacttcctggccttttcaggcacctgtgcaggcaggcgggcaggcaggcacacactcacatgtgcacactttaaaaataaaaataaatcttaaaaatagttttgagagaaataccacaggaagtgataaccttgttttatagaaatagttcctcatataattaatgtatttcacttataatacttaaaagctactcataaatagtagatttataacataaatgccaacatttaaaccaaatttattgagaaattgcataagaattaaatctattatacataggtatgtttgtattttttcttataacctgaagttttaggttattatgtatctgggttataagattgtaaacttcttcttgcttttctttttctctaggaaattcttctccttggtattcacaaaattgttgaaagtgattttactatgagcccttcacagtgtctgacctttcctttcctgcataccccgagtttaagcaatggtgtcttatcacagaaacctcctgggattcttaacagtaaagccttaggcttattgagaagagcacggatttcccgaggcaagaaagaggctgatagagagagttttccctataggctgctttcctcttggcatatagccccaatccacctgccgttgctgggacagaactgctggccacacctgtcagaaggatttagtgtttctctgtggtttaatgtggaatacatccatgaatccgagagtgctgcagaaaggggaaaaagagtaaagaaaagaaacaaaccatcagttctggaagacagcagttttgaaggagcaggtatgatggcagggtctgatctatatactaagattcttcaaatagctgtttgcctgagttttaagcatatctggcagtattttaatgtattctttaaatgttattcaccttaaagatcctacttcactactgaattaccaaagcctgagttttcaaacagccttgaaatcttcattgtctctaaactttagatagggaagtggggatgctctgtttctgcaacagctgttgaagttagcagtcccatgactgtgttagtgtggcttctgatactagatagttataaataaaaccctatggccatttttattttaagttctccttctgtgtcttacaccaatggccccttctagttactgtccctgatcatttatatgtaacagtccaaagttagaacagagttcatctgtaactgaagaactgctgttaggatgtattgaaattgaattttgtttttgttctcttcttttttaagcaatcaacagtttcttaagtcatatagcagctagaggaagtagtcttaaaaactggctgtgtatttttttaacctgttaaaaatggtggctaatatttttataccctaataattgataatgttcctcttttttaaaagtctgagcttttggacatgcactgtttattttagtacatcttagcttagtttaacataaagtcacatcatagtaacaaatagcttatcacacatattccacctgccattgctgtcacagataatgggaatatagaggcaactcaagatttaagtagtaagatgccattgggaggggtaagcagctagctcacagccataaacacttctctcagcggagacaaactgtgattcagggtttggcatcacttagcatgtttatttcaaggttgttcactaccttaaataatgatcatttgagcagtgcagcttttctaagaagagtattaataatattatagatcgtgcctttgtaacaatttttttagtgcaaggcatctgttgatggcatgtgctccctgggccatggtcagttgtgttagagtgacccaatccaacaaaagcagaaccttggtatggagtgtggctgacgatggtcctttagcaccctcaggccttgtagtttaaagcatttaataacttttaaaacactggagtttttttgatttgggtttttttttttaacccactgtgttcttttgaggctaacatgtaacctttaaatacagttgtttagaacaggtttcagcctttggtgtaaatgatctgttacaaataaaccaacatacattgttttctttaaaatttacttttccataaagtttttatgaactattttgttgatgattctaacattttttctcacagaaggtgatagaccagaagttacagaatccatcaatcctggtgacagactcatagaagacggctgtattcatttgatttcactggggtccaaagcattgatgatccaagtgtgggctgatccccacagtggcacttttatctttcggtattgattattctcaactcttagcaaatatatcattatttaagaaattatcaaataatatttataataacaatctgttattagacatcattacagaaaaaattaaaagaacaattatcagcagcacgtggattctatctagcagtacagagatagcaaaatatgccaaatcaggtgcctacacctccagcagacgtgactggagaagtcttgctgaaaacagtcatactggcagtcttggtttcatggctcgtaggcagacagaagatgctctccatgttccctaaaccagtacaaccattgttacgccatgcaataaggacagtaacgcctatgggacagtgtttctctatctagctggttttactcaaacagtactctctccttgtgtccttaagggcacaacacttttattcttgttctgttttcttgttctcctttttccctatcacagggcgaaggggccagcctgtccctggactagaaccttagaagacactttgagacaagcatgcttgggtttgaaataggggtgtggtgtttatcctgcttccagagacagcttctccatgagctcaaacaggacacagcaatttactagtttaatgtatattacatattatcttcctaaaagtcaaaagtctgtatggtatttagattttgtgttttgtagatattataaatgttattaggtgttttctgcatacattttctccttatactttcagtaatcttataaagaaagttagcatccaatacattctggaatttatactcttattacagtatgtattaccttcttgaacaaaatattacattataatttctaaaataaacaatgagtatgtaagtagaaactgcctttatagaaattgatttatagaaattattgcctaagttattgacatcagtcaatgaatttaatccattttagtttataaattgaggaagcagatgtaatgtgaaagtcacactgactttctcagttggtttgttttaaaatagaagttacttttaatctcacatattgatcatgacagttgcagcatatgtgttaactattaaggtcagaattgtcatgtttttgatctgtgacttttttctgcagtgtgtgcatggactcaaatgatgacacgaaagctgtctcactagcacaggtggaatcacaggagaatattttctttccaagcaaatggcaacacttagtacttacctatattcagcatcctcaagggaaaaagaatgtccatggggaaatctccatatgggtctctgggcagaggtaagaagcattctcagagatacgcttcccagttacagttttagttttagtcttcattcctgaaacattgcaaactaggtaaaatttaatatgtattaacagaaatttatataaaaactggattccttttctttnnnnnnnnnnnnnnnnnnnnttttttttttttttttttacgttggtttttcgagacagggtttctctgtatagccctagctgtcctggaactcactttgcagaccaggctgacctcgaactcagaaatctatctgcctctgcctcccaattgctgggattaaaggcgtgtgcaaccattgcccggcattggattttttttttcctgtttatcactccagtacagaagtcttccatagacataacttttgaaaattatccatgaattctgcttgagaggattcagccaacgttaaactgaaaatatctgagaattgcatctatgatgaacatttatagtattgccttctggttattctctagacaatagagcataacagctatttataaggcttatattatttattttaggtgttacaagtaacttaaagatagtttaacttatataagaggctatgtgtaagttatatgtaaatatggtattttctagaagggatttgaatattcttagcttttggtgtctgtgggatgcctgaaactaacttccaatgaatactatcgatgactatatttaggtatgaggagcaaactaaaaacctgggcattatgtatttatgatcaatatatactaggtaagtaattattggagatgtaatattgtccctcaaacccatatgttacaagaatgtatccactagaagttctttaaattaattgaataagaaggctaatggagtactactcagctattaaaaagaatgaatttatgaaattcctagccaaatggatggacctggagggcatcatcctgagtgaggtaacacattcacaaaggaactcacacaatatgtactcactgataagtggatattagcccaaaacctaggatacccaagatataagatacaatttcctaaacacatgaaactcaagaaaaatgaacactgaagtgtggacactatgcccctccttagaagtgggaccaaaacacccttggaaggagttacagagacaaagtttggagctgagatgaaaggatggaccatgtagagactgccatatccagggatccaccccataatcagcatccaaacgctgacaccattgcatacactagcaagattttatcgaaaggacccagatgtagctgtctcttgtgagactatgccggggcctatcaaacacagaagtggatgctcacagtcagctaatggatggatcacagggctcccaatggaggagctagagaaagtacccaaggagctaaagggatctgcaaccctataggtggatcaacattatgaactaaccagtaccccggagctcttgactctagctgcatatatatcaaaagatggcctagtcggccatcactagaaagagaggcccattggacacacaaactttatatgccccagaacaggggaacgccagggccaaaaagggggagtgggcaggtaggggagtggggggggtgggtatgggggacttttggtatagcattggaaatgtaaatgagctaaatacctaataaaaaattgaaagaaaaaaaaaagaaggctaatacctaagtcaagttaggtagaaagaaattaaatggctaaagaatataacgcatttatatttggtaatagacttagattgggtcttagaaccatacaatgtgacagattcaggtaggatactgcatgacttttgccacataaacttcacaaccaaattaataaacatttgtagactctcttgatgaaaacattaaccctgaatgagctgtgccctcgcttgctctaatgaaacaccagccaaaagcagctcagggagagagggaagggttacttggtttatgggttacagtccatcacttaggagagccagggcagggacgcaaggcagagtcctgcaggcaggaactgaagcagagaacacaggaatgctgttcactcccatgctgacccctggcttgctcagctgcctttcttatctagcacaggactacctgcctataggtattgcagcatagcacgtcctcctccattaatcagcaatcaggaaaacatcccacatccaggccaacaggctagtctcataaaggcagttcctcgactgagactccttcttcctgggcgactttgccaagctgtcaaaaactaaccagcacaaattataaaggtggctggaaggagtctcagttgagtcatgagaaagaaaaatgggtagaaaagatggaaaaaaagcttggcaagagtgagtgacaagctgacagttataatttaacgttttaataaaagtttgttatgtgttatatacttgttagaccttttgctaggtgttttatatatgttgcctctgaatcctctcaaaaattaagagagagaagttcactgaagtcatatatatccttagcacaaattaagtgaattttatcaggtatttatcaaggaattattgtgtgttagacatggcactgctgtaggaggctgcaagcaccggttactttcaaccatcagctttcaatcactgagagagagaacgaagaatggcgttggggtagtctatgatgtctgctacaggaagttaaactcaggtttagttttgttgatttattgaagaaaatctatcttcaaaacagtattcctaactgactaggcctgaatggcagctatacccaatataaatttattttcaggacactgggctggaactattagagctggatatggaccccattcttcttgaaaaatctcctcattccttaagctagtaacaactgcccgtcattgtgttttgtctttgcactgtgcctcattttatccctctctatgggatatacttcactatgaagtagtatgttattgacttgactattttacatggctcaactgagacctgcagtgggataatgaaatttgcctggagctgtgctacatgggagcagtctaggcaatacttgaagctctgagcctagatggtggtcatgctgtgtactgtgctgctccttcagccctttcttcctcaggacgtttgatggctataggaccgtactctagttcctaggcactttcagagtgagagaggaggttgtcaggagtacttctgcagttagtgagtatagtctcttgactcacacattgctctctccttcctttcccacttactaatttactttgctttgaagacattttttttaccagttggtagaagttaatttcattagttaacagatcagtgaacaagtgacaaaggtcagcagtattattttgttgatttaaatttgattctttattattttagaagctatgtattgttttcctacaaagaatgtatttcaaggagttattttaataaaaaaaatagcaggctaagcatagtgactcacacttgtaattccagtattgtagaagttgagacgggaggattgctgtgagttcaaggtcagcctagactatagagggagactaccttagagaagtgaacaaacaaaaacaaaaaaccataacaacactggaaaaatagcttattagcaccagaatcacataagagtgtgtgacagagatatgcttagtgtttattgtttattttacattcatcttgccatattttttgtcttgtggagattatatgctccagtacagggcaatgccagggccaggaagcaggagtgggtgggttggggagcagggcgggggtagggtatagggacttttgggatagcatttgaaatgtaaatgaagaaaatatctaataaaaataaaaaagaaaagtaaatcataatgctacaaggtggcggtagtgttttaattgtggccatttattagtccagaaaggaggcagtcatagtatctcatttctttcctttttaaaatatatatgtatatatggaaatttttatttccttttattattatttatatatgcacatatatatgtatgtgtatgtatgtgtatagtgtattcctcttggggctgatgagatggcgcagcaggaaaaggttcctgtcaccaagcctaacagtctgggtttgattcctgtaactcaattgagagaattgacttctacaagtattgagacttagtgtacatatggacacagaaatatacacacatatatacaaaaatgtgattttaaacatgaaaaatgttactataagataattggttttatttactaaatgtgaatcagagactaaagttttaaaataaatgtattaaaaaggtttaatttcttaaagtgagttatccatgtaagtctccattttcaaaattttagactttgccttgataagtcatcctcattgccctaatatggagtttaaggcattcctgaaacaggacttgcacttagcagtgtcttcaggtgatggagtcccgtcagcctttgtgtttgtctctgagaaaaccttacttttacctgtcccagttctgttttacataagagttcttgaccagcctttacagagaaacagaacaaacaaaatttctgtaatctttagcattagaaaacaaaatacaaaaacactggtattttagcgtttaatacagaaaaagttgggaacatttggaaactgatttccaaatagaaatcattgccaagatgtgagactttgacaaaataaggagagattattactttgttctgtaagccaaggcggcacacatgcaggaggcaggtcacaaagacagtgtggagcaaatgccaggaaggggcttgtgtgggagccaggagacaaagagcgtggagcaaatgtgttttttcttcctggcaatatgtaggatcgcttggcatctcttctacaggtattgtctgctgcctgcacctctgaccaagagacagaggctaccctcttttcctttccattgtctataatacaactcaggacctagagaagttcgggaatctccccttattaaacgctcatggtattcctacatatcattaatttaacttttgtttttaatgtaggaagactgatgtcatcttggattttgtgctcccaagaaaaacaagcttatcatcagacagcaataaaacattttgcatgattggtcattgcttaacatcccaagaagagtctctgcaattagctggaaaatgggacctggggaacttgctcctcttcaatggtatatttcccccatgaaacatttacaaactttaaattaactcatcttacataaattaacctgagagcaatcctggtctctcctccttgacttgtgtttaataggtacttcattcccaagattctcacactcacgttcaggatattttttaccgtttttgttacggaatatttccttacagttgctaagtgatatggagatgtagtttctaacctcaccccatacacttaatcagcgttgcttaggaagtacaatgacataactaggaaatctatttatgtaaatcttatttatgacttttaatgtgtgtgtgggtgttttgcctgcttatgtgtctgtgtaccacatatatgcctggtgcccacagaagtcagatcccgtgtcgctacagccacaggaagttgtaagctgctatgtaagagctgggagttaaatgcaggccctcggcagagccagtcagcgctcttaaccatgaagctccttctgtccctcttctatttgtgattttagtgcattctatccaaatagtgaatttttgcaaaagcattgaaatatattaagcctggcacatggtagcatttggagtgtgtttagatgagagaaaataaaggcatcaattctaatttcatttaaaatgaaatgtaccaagaaagagttttcgtcaattttttaaggtcctcatttattaaaaaagaggaaaacaaaacaaaaaagcagccgggcagtggtggtgcacgcctttagtcccagcatttgggagcagaggcaggcagatttctgaatttgagactagcctggtctatagagttagttccaggatggccggggctatacagaaaaaccctgtctcaaaaagtcaaaacagcaacaacaacaacaagaccctgtcacaaagcagagggtagcggtggcgatggtgatggtggatggatggtttagaagttaggaacactccttgctcttgcagaggatcaggttccgttcccagcacacacatggtggctcacaaccatctgcaactccagttccaggggatccaatgccttcttctaaattcacaggcaccaggcactcctgcaggcaaaatgcccatacgcataaaaataaataaataaataaatcttaaacagcaacaacaacccccccccccaaaaaaacaaaaagaaaacagcaaaacaaacctaaatgtggttaaattaaaattcaccatctttaggaacaaaaaaaaattattaaaagcttctgagtttactttatatctgtgcgtctttaacatagtctacataggttagcgtcctttacacttatttggaaactgagcctttgagttttgtaagatacagtaaagcactgaaagaatctgtcacacacacacatacacacacgcacacacacacacacacgcacacacacacacatacacacacacatacacacacatacacacacatacacacacatacacacacacacacacatacacacacacacacacacacacacacacacacacacacacacagaacctcattttcttgctgtttatgaaaaattctacttgaaatgctttttataacgagttctacttttctgtttatccaggagctaaaattggctcacaagaggcctttttcctgtatgcttgtggacccaactacacatccatcatgccgtgtaaatatggacagccagtcattgactactccaaatacattaataaagacattttgagatgtgatgaaatcagagacctttttatgaccaagaaagaagtggatgttggtctcttaattgtaggtttctgtagatatgttcattggaatgtataattagcagtgagttagattcctaaagtttttaattttgttcttttcttagaatgtggagttttttcttaaaagaatttatgaaacactttaatatactgttaatcttgtttcatgctttagttgtatgtattcttatttgtttgaaattatatttatatagcaattttatcagctgtttattttatacctaataatcttttgtttatgatacattgaagatacaacacttttagcttgatatagttttttttaaatatcatgttatatttctattcatacttattggtcatgaaaactttatatgcctcagtacaggggaacgccagggccaagaagtgggagtgggtgggtaggggagtgggggggagggtatgggggatgtttgggatagcattggaaatgtaaatgaggaaaatacctaattaaaaaaaagaaaataatgcaaaaaaaggaaagaaatacaaagattcacttataatattagctgtaattgcatgtattaagagactatgggatgcttcagtgggtaaaaaggtttgttgtgcaggcctgaccttgtgtgtgtaggctcagcttgaaccctgggacccatgtaaagctagacagaaaaccacatgcctgttgcaacatgtatatgtgcacacacacagattaaaatttagtaacatgtattcatggtttacattatttactcattaatatcaatgtaaagtaggcatttccccttcaaagtattgctatttgttccctattgctttttcacattattctttaattttgccctaccagtgcacagttcaagagctactggtggggattcttgttaatagcaccagtcagctataccggactgtaaataagacatgtgctatgcttaatgagactacttaaatttctatgacttcttataagtgaccaaatcctaggattctctttgacttctgtgagtagtagatcagagaagtttcacatggaccagtgttggttgaaactactatctgtgaaaggaaaaatttgacttaattttatttacttatcctgacagtgtgaaacttagttttaatgaaagaaaaatctattcagagatattcctttttaaaattgaaaatagattcttctcttataccgtacatcccaaccagtttcctctccttccactcctcctgatgaccctcccccagcttctctctcccccagcttctctctcccccagcttctctctcccccagatccactcctgtctgttcctgttcagaaaagagtaggcttgaaagacagaacagccaaagaggataaaacaaaatagtataggacaaagcaaatgccctcatatcaaggctggctaagataacccaataggaagaagagtctgaggagcaggcaggagagtcagagacactccctctcctcctactaggagtcccacaaaaatgtcacgctaacagccttaatatatacacagaagacctggtacagacctatgcaatccctacgcttgctattttggtctctgtgagcccttgtgagccctgctgattcagtgggccatactctggtgtcctccaatcccctctgactcctacagtctcttcctccctcagagacacatttaactaagtaggcagcctatgagcaaatccaaaataaaaacttgggtaagttagtccagagttcaggtatttctaagaatttagaacagtgccaaaaataagttaaccgtagcagaagacttaactctcctgtattaaatatctaaggtcttatctatgtgagcttgattatagtgctaataatgcattctctgaataacgagaaaagggcttagctctagctagtagtatttatgttttaatatcatgttgattctggatttatcaaaggcagactcctcagttgtgcttcaggtcattggtcacagtttgattaactggtcagtgctgttatgagaggcagctgtgcctctctgtctatctttgtttgtggctatcttttaaaaaataaaaaataaaaaataaaaaataaaaattagttaagtgaaatatctgctagttgataggtaaaattttaaactgttttgccactaaatgaaatgtttgtgttttaggaaagtctttcagttgtttatacaacttgctgtcctgctcagtacaccatctatgaaccagtgattcgactcaagggccaagtgaaaactcagccctctcaaagacccttcagctcaaaggaagcccagagcatcttgctagaaccttctcaactcaaaggcctccaacctacggaatgtaaagccatccagggcattctgcatgagattggtggggctggcacatttgtttttctctttgctagggtaagagtcatggtcatagttttctctgaacagaagctccatctctttagtgataaattgtaaggcttcttatagaataccaaaaaactatgcttaactatactatgtaaaactttaagacagaaaattatcacatagtgcagctgatactaagctttcagccatggatgaaaagggtttattttaatttttgaagattttagaagttttctactatctacaagtataattggaacaagtaaatgttaaatatgtgagtttttaaattgtctttggaaaggaaaatatatgctatactaatgatatgaaagaaatgggttgttttttttttttttttgtttttgagacagggtttctctgtgtagccctggctgtcctggaactcactttgtagaccaggctggcctcgaactcagaaatccacctgcctctgcctcccgagtgctgggattaaaggcgtgcaccaccacgcctggcctgaaagaaatgttttgaaatgatttatctattttaattatgtgtatgtgtttgtgtgtgtattcacataatatgtgtatatactggtagaagcttgtgtgtcacctgacctgggtgctgggaaccaaactcaagtcctctgaaaaagcagcaagctcccttaaccattgagttatctctctaaattcaagatgttttcttttttaaaaaaaagagagagagaaaactttgtttacaagcatcattttaaaataaaccatttatttatctcttctctttagctgctcacaggcaggaagaacatctttcctgacagagaatgagcagtccgtaattcagtgcttcctatttaaggtttgctgaaaacacaatttggacacaaataaccttgttttgctacatataatttctatttcgtcaggtctatacccctgtttaaggcaatgtggatcttcctttatccatagaatgtcattttgttttatccctaagtgtatttctaaaacatcatcagattttcacagtatgtccttcagggacttgcttcctttaatgaggccacctttgatctaattttgccacaaaggatgtaccagcatttgctctttttttttaaatgatttatttatttatttttatatatgtgagtacattgtagttctcttcagacacaccagaagagggcaccagatctcattgcagttggttgtgagctaccatgtggttgctgagaattgaactcaggacctctggaataacagtgttcttacctactgagccatctctccagccccagcatttgttcttgttaaagttttaataaaggtcttgctagcatcttctctaccctaatgtgtttcctgtcttgtcattcatcctcctactgcttttccccatctagtatctaagtgaatagatttttgtgatctcctttcacattgtaatttcaaaatgtatgtccttttttcctattttatccaggtagtaaatataattggatcctagaagaaaacatttaatttctactgtgcatatatttatgatcttgctaatagacacttgaagtatgttttcacatttaaaatttaaaatgtgttcagtattcttctgcttcctataaagataaaatgtatttttcctaaaagccttatataaacagcctgtcttttaagcctagtttgtttaagccaaacagaaatgtgaacctttaggtgttccaagtataggcctgtgcctttctagatgtgccctgtgcccattccccatgtccctatctatgttccccatattcaggccttgtatgcctttcacttgaggctaccttcttagtgcagccttcagaaatctgaaccttgtctttgtcttttattgtgataatcgtgcctggtccttataagtcagaggtatcagaggcactgattgaagtatgctactaggcacaacatgtggtttttctttttgcctttatctttatgcttcacagaagccctcatggtacattgtaccctttgcttctttatgtctcccataacacatgatgttgttgggtctgcttcttatgttttttaacttttattcttctctcatactgtacatcctgactacagtttacctccctccactcctctaaggtcctcctttctcccccagatcaagtcctcctgtttacctaaaaaaaggcaggcctctcagcgatatccactgaacatggcctaaccagatacaataagtctgggcacagaccctcatatcacaactgaacatggtaccgtgagaacacggcccacagaatcaactaagcaggtctcataggggctcatagaaacggaagtgacaaacacagaccctgtatgggtctgaactaggtcctctgtatataccctacggtcatgtgctttggtgttcctgtgggactcccagtaatgggaatggggggtgtctctgactcttgactgcacttgagcctgtttcttggtcgaccatggaaaactcaaattctatgatcccatttcagattactaagtataagatgctagtgatctctaaggctgtcagtgttatctttgttcattttagtatatttgagaaattaaaaagaatggaatttgtaattttcagttttgcttatctataattttaaatatttaataattaacatttaaatacaaataagttatagtataagcatcaagaatacttgatatgacattattttagataatcacatacattaaatttttactattaacagactaagaggaaaacatctgctttttgttttcaggttgttgaacttagtagctgtgaagaaactcaagcattagcactgcgggttatactgtctttaattaagtacagccaacagagaacacaggaactggaaaattgtaatggactctctatgattcaccaagtgttggtcaaacagaaatgcattgttggctttcacattttgaaggtattacttcacaaaatttgttcttgttgtttccatgcagtgacatctcttatcaaaatgttccataatcattttatgttgctagtaagtaaaggaaacttactaatgtatatgtagtcaaaccttgatactcttgattctttccataataattttttcttctttctaagtattttagaaaggaagaaaataaaccataagaatttcaggtctaaatagacacagatgtattttacagcaagccctttgttctgtggctaatggacttgtttatctcactctcacacttgtagttccccctgggatgtactactgcagtcaacccatgttgctaccgttagaatttgttcttgttgtttgtcatgtttgtatgtagggggccttaggatatgtatgcactggtgagtgcacatacaggtgtgtgtgtgtgtgttctcagaggacagaggtggatgtcaggtgccttcctctagctctccaacttaatttctgagacagggctttcatactgaacctgaagttcagcttggctaagtgttctggtctctgccctgccttagtgctgttacaggtgtgcataggcacagctaactcatgagaggttttggactcaagtactcattcttgcgaggaagacgctttaccaactgagccatttcccagctctgaaattttgttatataatattttagttcttattgagaatttcatacatatacataaaatactttggtcaggtccacttcctacttctcccttccagctctcctggaccctaccccaacaagactgcctcccaacttcatatcctcttgttcttttttcttttttatattttctttttttttctctaaacacttatcaaatttattgtttgttggcttaccatgatataaatacaaaatcattgctccacatagcctcagagcaaggagaacgttcaatttgacatagaaattctaactgagacttagacttgataaaagagaagaaaactgactagggatatgaagaaaaaaaatctctaagaaaaattctataacaaaatggaaacaaagggataatcatagagggcttaccaatatgaaatgtaaaaatcactgaatattctaagtccacatccttctcaaatgtatgtcacataatatcctgtataggatggctctgtgattgacatttaatagtagtcctcttcctggtaagttattaatacatatatactatgtacctttccagattatcagaatgcttctctatatattttgctttacattttctttacatgcttcttagaaagccctcagcattaataagaagcagctataatagatcaccatgatgatcaactaacgaagagaaaatatctatatattggaggtttcagtcaatggtcagctgggcatattgctttgaccatattctgaccccataatttatggtggcaagaacacagtcattcacctcatggctaagatgtgaaggagagagaaagtagggggctagagtctcccagtgccatttaacgtgactccaatgacctgactgcttccctttggcctctacttcttaaaagttgtaccccttcccaaaacatcaaaacctttaagtccacagaactttgaagacattcagtattgaaattatacaaccctccttgccagtggaaaagttatgaatcttatctcatttcacacatgaatagatctgaagatgccgagaatgtttaaatgatgggcatcaggctaaaagttggctgttggcaataactttactgctgacccttcctgagtatgctgtgggccctctgacatgcacattttcttttttccaagtctcctgatttcttctcatcatctttgtagcatgttttcctctcatgttcccctttctgcccatttgactcttcagctttgtggtagaacagcccaatcatactaatagcatgaaaggttaagaacatcttgctgaagctggatcctgaaggctccatgcccattataggcacagaaaacacacatgtcccagcaagttaccatgacagccaaagattttagaaggtcagtttagtggcaggcattaagttacatgtggtggtggtggtggggggggtgttccttgctgagtcctaactcttgggtttaaatggaagctttctctgagagaaataacgcaacttttgtaggtcagtggctggcacttccttctttaaaagcaattgggacatcaaggggagactgacaagcacagccatattttttctgtttcctatttcacttagttgaatttgtgaacttccttaaatcttctttcccgagacagttacagaactaagatgtcaacattggtctgaagactgattcttggtaattactcctccaacaaccttggagatggcttatgttaagaaacagatgtctttatcacaattgctctgtagtaaagctttaggtcaggcatggtgattccacctttttaatattttcttattaaaaataaattctcttctcatacagcatatcccaatcatagtttttcctccttctactcttccctgttcctcctcatcctctctccagatccactcctttcctgtctctcctaaggggtgggggaacaggttcctaagagataacaaccaaacatgacaaagtaaaatataagataaagcaaaaaactatcattgaagttgcacatggcaacacaaaaggaggacaatagtctccgaagcaagcacaagagacagagacatactcattctcccagttaggagtcccatagaagtactagagtcatagctagaatatgtacacagaggaaatggtgcagacccaggtaggccctctgattgctgcttcagtctctgtgagcttatatgcactttatttggctgatttaaaaggccttattctcctggtatcctccatcccctctggctcttaactctttccacctcttcctcaggagatttctgcatcccctctgctcctgtctcttcctctttacctagcatctctgagtttatgggttatagtttggttatcatttactttatgactaacatccccttataaatgaaaatataccatatttatctttcttggtctgatttacctcactcagaatgattttttttttctaattctatttgcctgcagattttaggatataatttttttgacaactgaataatactccattgtgtaaatttctttatccattctcctcttaagagccatctagattgtttccagttttttgctattgtgaataaagccaaggtgaacatagttgagcaagtgtgtttgtggtaggatgaagtatcctttgggtatatgcctaagagtggtatagttgggtcttgagggaaattgatttacaactgtctaagtaactgccattttgatttcaatattttttgcactcccaccagtgatggaggagtgtttctcttgctccacatcctcaccagcatgaactgttgcttgtgatattctgacaggtataagatggaatctcaaagtaatttggatttactttttattgatggctaaggatggtgaacatttctttaagtgtatttcagccatttaagattcctctattgagaattctctgtttagatcgtttccccatttttaattaaattctttgttattttgctatcatgattcttatatatattggatatggagttactataaaatcttttcccaatctataggctgatgctttttccgaatgatgtgtcctttgccatacagaagcttttcaggttcacattgtcccactttttgttgatcttagtggctgcactattgatgttctgctcaggaagtagttccctgttctattgtgttggagggtatttcccactttcacttccatcaggtttagtgtatctggttttatgttaaggtctttgatctacttggccttgagttttgtgcagggtcataaatatggatctatttgtgtttgtctacatgcagatatctagttagaccagcatcatttgttgaagatgctttttccttgtgtgtatttctgaattctttatcagcaatcagatgcccttacgtgtgtggattatgcctgcatcttcagttcagttccgaagaccagcatgcctatttttctgccagtgccatgtagattttttaagactattgctctatagtagaacttgagattgggactaggacacccagtacttcttttattgcacaggagtgttttagctcttcctgggctttttgtttttccatatgaagttgagaattgtcctttcaaggtttgtgaaaaactgtattggaaatttgatggcaattatattgaatctgaattgcttttggtaggatggccctttttactttgccaatcctaccaacccatgagcatgagagatcttttcatcttctgatatcttcttcagtttctttctgcagagacttgaagattttatcatatagatcttttatgattgtttacacttggttacacttactccaagatattttatattatttgaggatattgtgaaaggtgttgacttctttctcagtccacttgttatttgtataggagggctgctaataaaaatttttttcagattaatcttgtatccagccattttgctggaagtgtttaccagctgtaggagtttcctggtagaatttttggggtcacttatatatattatcatatcatctgcaattaatagtactttaacttttttctttccaacttgtatcccctgatctccttcagttgtcttactgctctagttaaacttttaagtactggacagatatggagaaagtggacacctttatcttaccactgacttcagtggaattgctttgagtttctttccatttaatttgatgttgctatcagcttcctgtatattgcctttattatattttaggtatgtcccttctatctctgatctctccaggacttttattatgaaagattagggaagtgagagcgttgatgttgagagttatcaatcaccagtgattgttgatttctgttattttgttgttgttagtggtggtggtggtggtggtggtggtgacagtggtagagaaggtggtggtgatagtggtggtggtggtgacagtggtggagaaggtggtggtggtggtggtggtgatgacagtggtggtgaaggtggtggtggtggtggtggtggtggtggtgatgacagtggtgaaggaggtggtggtggtgacagtggtgaaggaggtggtggtggtgacagtggtgaaggaggtggtggtggtgacagtggtgacagtggtggagaaggtggtggtggtggtggtggttagatgtaattgtagtaggccttacattctttccttcccatcttctttgagcgacaagaaggataaatcaatagctagaaggttgcttagtatccttaacatgcataccataggttccatccctagcactgcaaaaaaataaaatcaagatgagttgtaggtattttatcctgtgtttgaaataaaaagtcataaatgtttggaaatttatgatttgcaactaagttgaattgctttataacacagatatttggagaaatgtttaatttttctagtttctttttttcaatttgatggtatgactgctgagctgaaaagtttgataattctggtaaacatatatttagttaatcagtcattactgaaatttacactaatgctaattttctgtagacccttcttgaaggttgctgcggtgaagaagttatccacgtcagtgagcatggagagttcaagctggatgttgagtctcatgctataatccaagatgttaagctgctgcaggaactgttacttgactggaagatatggaataaggcagaggtgtgtaatgcatacttttatttcatctgcatagtgatgtacagtacatgcagcattgggtttgcttaacctgatcattttaagtaccttatttagaagcattgcttgcattccgatattacatagccatcaccaacaaccacctccacagttttcatattataaggcagagctctgtacccaccaggcctcttttcttctccccatcctcacaactgccatggtattttagggtctgtgattatattagtataatgcctcctggattcattcatgatggtttttgctcctctgaggttgaggaatattgtagtgtgggtgtatgctgtggtgtactgggcctctcgccctcccctccccaaaggacatttaaatataatcatctaaataagcatttttaaaggacatgagataggaaagaggtgaggtacatctagaaggagttagcagaggagtgtgaatatgatcaaaatacattagatgcatgcatgaaagtattaaatcatcagtaaaaaatatttctaacagtcgctgatcatgctggaggaaaggataattttgctgcttcagtgtaatgctaatgttaaatgtaaatccagaagtgtatgctctgtgtaaagctctgaacttcctgaagtaatgatgagctgaatggaataaattttaagacttactttcccctccacaccaacagactcaagctttgaagtagaccatgcacagtgcgttaagtagttatgtttctaggcttctaagaggcccacagtatgtttccataactgtgtgctaattggtgcatgtttattttctcagcaaggtgtgtgggagactctgctagcagctttggaagtcctcatccgggtagagcaccaccagcagcagtttaatattaagcagttgctgaacgcccacgtggttcaccacttcctactgacctgtcaggttttacaggtacttttcccgtagcttctctgcaggggcatcttctgcagtagcttctatttaataacctactgctgtgcacatcagagtttcacaggtcaatgggatttttttctgtcttttatcttacttactctgtaagcatgttttctttcagctcttgcctcctgatctttatttacactgtcatcttctctggctcaaactacaaaagaacagctactaaatttctgcatgtttctttgtattggaatataataattttgtggtttcctgaacatcagctgttagtgatccttaactcactctatactctttaaataacaacttacatatatgtatgcttttaataaataaaacttaatcatagtctattttatatgttaactagcaatatggatatatacctaaaatactatattaaaaagtgacactgactcatgtactatgtctgtgctgtgacctgactttacaaatgccctttcatctgcctggttggtatattggactatttccaaggttttgtttttgtttttagtgtttgaaacatgttgatcttgtcaagtgagataagtccagacatactgtgggatctttactatttcgtgaggccagtacttttgcttctatagcctgacacctttactgtattggtgggttaaattgttggggcctgccagcggctcacatgtccgggttcgagcctggaaggcatcttggaatctgggagaaaagagggagcctaggcgggttgagaaataatggaactggtgatgatgtgcaggatggggcatagtctcctgaatagctccggggcctctcagcaggtagcagtatcttgaagaggagcagcagccaaggcagaacaatagagtgatctagggaggaaggctccaccctagataatttccttagtggcagcaaggtcaaattctggctcagcctgcttcaggcttctgggaagctacattaaaatctaaatactatgacaatacctcaaaggggtctatgtgatctgatgactaaattgtctcaaaattaacagctcccctttattatcctctgattcagcagtacataacagtaaatggagtggagggacaattatgtgtcatatttggacatatggagacagaagacaaggcagttttatattctgtgcccttaatcaggaggttaattactagcctctgaggagatggagtttaagaacataaacaagttatgacagcctctatttttagtaaggcgtgacatcctactaagttctataatccaagcagttgaaagcacagcacaaagaaactgggggcctgtgtttggtcatagttgtacaattatttgtttctttgtgtggttcaagctagtgaaataaccatttaagcctatattctggaagtgaaagataagaccactgtaataaccactgtgagaaaggactttgcaagctgggccacaggatattgctgtaacttgtgtgctgcattacaagaggtccatgcagatctagtagccatagtggataatagtactaacagtgatgctagtgttaaaagaactaagagttttatggctttatgcactttaaaaaatttagtttcgaacattcctgatttggggctttcatatctataaagtctgtacaaatatcctccaaatccaaaaacctgaaatctaaagctcttctggtctacagcgttttgaattacaagatggcttagtgtctgaggtgctgttctaagagtttgtatccttgaaaaaaactttttgttgttgttttacaagattgggtttctctgtggtgtcattgaatttgtaaaatgagcatacatactagtgttagcatattcatatagacaaagagacagtatagcaatgttaatgtaagtgtagggccacattgcacacttgaattctgcagtgtaacttggttcagttaactaaattaagagggctagaattaaactgccatcacttgtaattaatttataatggcaaaaatcactggggttgaaaagtagtacttcagattaatgttaaatatggttagactagagtagtaaaccaacaatattctatcttaagaagaatatcagtgagatgacttggcaggtagggtgcttgccatataggcctgatgactccgatctccagaactacattaaagcagaagagaaccaactccacaaggtgtcttctgacctctacatatgcacctccaacactaataatagtgacttttagaggactatcttgtttaaataaaaaaaatattagctgacagttctttaaatctaaagagattttggcttttatttttacaggaacacagagaggggcagcttacatctatgccccgagaagtttgtagatcatttgtgaaaatcattgcagaagtccttggttctcctccagacttggaattattgacagttattttcaatttcctgttagctgtacaccctcctactaatacttatgtttgtcacaatcccacaaacttctacttctctttgcacataggtgagtaagatcattgttagattgtagccatttctactctagtctttttcctgccgatacatatttgttttgatatttactgaatggtctctctgtgctggaaaaagccctaatgtatgttggtggataaaaggcagtgagttactagatagatccagagaataaacagaaggtgtgaatgagaacaaaaaagataatgtagttgtatgttgatggtacatttaaaaagtcaagatggaaaatttcagtatgaacctgaaaaggatgattaaactgaaagtattacttaggattcatatcatatactgaagagaattcataaaaatataagacacagatcggagagatggctcagtagctaagagcacttgctgctctttcagagggtctaagttcagacagattccagcacctacctactactgcctataactctagctccaagggatctgataccttcttttgacctttgcaggttctaggtatacatgtgagagctaatatacatacgcataaattaaaatttaaaaatttaatatataggcattcaaggaataaacaggtaaagagtttatttttgagagatcagaattacacagtaagggggaactgtaaaatgtgaaaccacagaaataattgttaagacagttggagttcaaagaatgtagaagttaacagtcacaaaatccaaagtgagaaattataaagggaatacttacatactatatttgatactatggagcaggccttatttgtttctttttgaacatttttttgtcaaaattcatgtctaatgatttacttttaaaggtttttgttgttgttattgttttaccctaaaatttttgctgtctcaaaaccattttgaattccagatggcaagatctttcaggagaaagtgcagtcactcgcgtacctgaggcattctagcagcggagggcaagcctttcccagccctggattcctggtaataagcccatctgcctttactgcagctcctcctgaaggtaatcatagcaaatattaaacttccgctcatattatttcagttatgaatattcatggatattagattgtgcttattgtagcagtataacatgacggtatctagcccaaagtatgtttaaagaatccaattttatccgtcaaaacgaatttgtgtatacacacacacacacacacacacacacacacacacacacacacacacacattcagtacatgagagtgagaggggaatgtgggagaagggattttagccctccttctagaaagaagatccacttggaagttctggtagctagaagaggaggcagtcatccctttggaccactctaagaacctcctgtctgtggcttctctgacactgccccagttccctgggctgctatggtattagccagaaatgcagcagtttctttgatgctgtcttcagtatctgagcctgtggctgttgacttgaaaagcctaactgtggttcccagccagccagcttcactgctttaaatgcttttaattgctgtgtgaacagagataattctcttttctttctccatagaatgagtatttaagtctttaaactcatagtaatttcctattttcttagttattcttaatagagtacatagtgtgtgtagatttcctggacatgaactggccggccctacgtgtttctcataccagcagctgtcctctttatcgtcaggacagccttatcttctactctactgtaaacatctattaagtcttggaggcaaagtagatctacaggaaatcgggataagatgtatgggtgttaatctccaattgtgtttcttttctttttttttaaaaaaaagattttatttattcttatatgtaagtacactgtagctgtcttcagacagaccagaagagggcgtcagatctcactatggatggttgtgagccaccatgtggttgctgagatttgaactcagtaccttcagaagaacagtcagtgctcttacctgctgagccatctctccagacccccagttgtgtttattttctaaagcatttcagttattctgtctgaatctaatagaagagaaagtgggaaagaacctggaacacattggcacaggggaaatttcctgaacagaacaccaatggctcaggctctaagatcaagaattgatacatgggagctcatgaagctgaaaagcttctgtaaggcaaaggacactgccataggacaaaacagcaacctacagactcagcaaaacgttaccaacactacatccagtggagtttgttttaatagtcatttattataatatttaaggctatgttttagttagttccatctagtattttataggaaatgtctttaaaaattgtatcattctgaattattttcaaatatagtcatgccccatttttctggattatttgaacaatcttttagtaactttagcctgccagcccaaatcaagaaattactaggaaagagttccaagctgtgtatctgttttatcggcacaaagctttacctctaaaatagtcctttcagaagctatttacactacatagttataaaacgtgaacatgcacacaagaacctgagaatctcattcaaacactggttgctgtgtacctctttattccatcttgtattcttgaagagcaggtttaggccagagcctgagaatataaattcttagctattggcccggtgctgctgctccattgctgctggttcacagccacatttcgggtaatttgtcctatgctcataagggatttttctggtctccttagcatagtgttgtcaccattacattggagagctatgaagacgggggctgattatttctccttagtaagtaactgcagaaatagaggagaaagaacagaaatagtctgagggccgattgtcgaataatgtcaagtgccaccttttattaagcacctgttagagtccaggcacaatgtcacttgtatcacacacgagttctcttcatccttaaaaactctctgcagagttgacatttttgaactcttattgtacattttcagaaactaccacttatatagtaattcaatgatttacctgtgacctctgaactagcagaacctttatttgaattagtcatgtcttcttgcaaagcctgagctcttttcactttgtcttgtttgtaccctgtttctggcttaaggaaattaaattgcactctaatttacctaatttctgaaccattaatcctaatgacttcaagctgtaccatcaatactttattaatgaaacaggaaatgacatgtctttgaaagcttaataaaatgtagttaaaagaaaaatattttgggcacataccaattttaagcattttttggctaggaaaattatcatttataattcttgagtagtgcaaggcaaggtgggctgtggcatggttgtgactttagaagagaagtggtgctgtttagtagattttttcttagttttttattatttaaatgcattttatacatcagacatattaataatattgagtattttgagaataatacataaaaaatttgttcagctcttatattcatatcctttcgtaccctaaaaatatcattaatgaatatttaacactatccataactgaggatcctatatctaatgttgaatactaaattgtttcaaaacatacaaaatattctttgggagttaagcatagtaaaagggcataaaatattaaaaatgaatcattatttagaagcccttatatgacccttatataccacctgacataacgagagagtatttaaaatgcattacatatctgtgtacgttgtataacagtttacttaaaaaaggttatcagtgtttctagaagagaaattattttatcagtaactatatttaaattttttcaaaatagcaaaaactctttgaagttaaacattaagaaaatgctaattttaagcacagtgagaaaaatgatcaataatatttccatgatgtttgtagaacatgattttaatactttcaactgttgatattcaacaaacagaatagttattttaagatatacttcattgttatgtctcccttttcatttctgattttattaatttgggtactgtctctgtgccctctgattagtttggttaagagtttatctatcttgttgatttgtttagtagatttttaagtactatttttctgtctacatttactaggaaccagttcttccaatattgttccacagcggatggctgctcagatggttcgatctagaagtctaccagcatttcctacttatttaccactaatacgagcacaaaaactggctgcaagtttgggttttagtgttgacaagttacaaaatattgcagatgccaacccagagaaacagaatcttttaggaagaccctacgcactgaaaacaagcaaagaggaagcattcatcagcagctgtgagtctgcaaagactgtttgtgaaatggaggctcttcttggagcccacgcctctgccaatggggtttccagaggatcaccgaggttccccagggccagagtagatcacaaagatgtgggaacagagcccagatcagatgatgacagtcctggggatgagtcttacccacgtcggcctgacaacctcaagggactggcctcattccagcgaagccaaagcactgtcgcaagccttgggctggcgtttccctctcagaatggatctgcagttgctagcaggtggccaagtcttgttgataggaatgctgatgactgggagaactttaccttttctcctgcttatgaggcaagctacaaccgagccacaagcacccacaggtactcatgttttcttgtctcagaatccctgcactagaaatgtcttcattatgccacttctgatcatattacagtaataccaagtaataccaactgagagcctgaattgttttttctaaatatattttatttgttaattctttgagaatttcttacacctccaaacatctccaagatacagttctgttctctatctttatccactccccacttcatgttctctctctgttgtttttttttgaacaatccaccatgtccaatttgtgcagcatatatactcatgagtatgttgccatccactggagagtggtcaccctactatgggccacacattttttaaaaagctgaccttccctcagaagccattggctgttcatagatgctcagttggggtggagaatcataagctcctccttcctccatgctgggccggtgccttcccttggagttgtgcaggacctggagatttcacttcagatagtctaagtagcatatgtggtcacgaatactgtattatagtatattgtctgtagaaaaacctctgtcttaaaaggcaagtttgttaatcatgtttaaattaggaaacattttaaaaccttctgagcatttgtcttgccatgtcaatgcggctcctagggtattgttcatgtgcctttctttttgatgctgtgttaagacttttctggtttctgtcacagtgtcattgaagactgtctgatacctatctgctgtggattatatgaactcttaagtggggttcttcttgtcctgcctgatgctatgcttgaagatgtgatggacaggattattcaagcagatattcttctagtccttgttaaccacccatcacctgctatccagcaaggagtaattaaagtaagggcaggaactaataagtgacgttttcatcaggaatatatgagtatgtgtgtgatttgtttagtatatgttaagacttaaagcttatttcatatttaataatagtgaactattgggcttggagagttggcttagtagttgagagcattgggctgctcttataggagaccgaggttcaactctcagcacctatatagtggcccacagtcatctgcagtttcagttctagggcatctgatagcctttcctggcctctgcaggcaccagaaacacagtttatacatgtaaatgcagataagacatccatatacataaaataaaagttaaaataaagttatttaaagtagcactcaatagttttgctatttcatactggcattttgtgtattcaatttaatcttaagtctttctcatatattgctttatatcaatttaccagtaaagtctatttcacaaaaattataagaatcatgtagtttattggaattctttcctgcggtgtagtatcaatttttgaacatttcagtctcagctcagttatctcctttttaaagaggcctccctgattgccatgtcagattacttccctctagccatactctttatttacgcatatatgtatatattcatatatgtatatattcatatattgtcatctctaatgtaaacttcagctatttacagttgtccatatgttgtacatactaagtgtactgacaaagcaatgaatattcaatgtgaatagcttcctttagaatcaccaatagcatagaggtgctagttaatttctttatgcaggtaacatggtttttagctttctctgtatgtgtctgtgtatgtgagtgaaaggtaatagcttacaaatataagaattatatacagtttgaattgtatatattaaatgttaacatctaaatttttttctttagctgttacatgcatacattaatagagcatcaaaggagcaaaaggacaagtttctgaagaaccgtggcttttccttattagccaaccagttgtatcttcataggggaactcaggagttgttggagtgctttgttgaaatgttctttggtcgaccgattggcctggatgaagagtgagttctctacaccataattcagatcctttgtcttaagtataaaatttagtgactattttgggtctcagaaaaggtctgctataaatcatctcccagagaattgatttgttattttacatttgatgttctttctcttattacttcttcctctgtactttattcactatttagaaactggaaactaataactgcagtagaaaatgaaagtgacagagaagatttgacatgtagtactaacatgagaagctacctgaaagaaaggtggcccctgtaatctcagtgatgcggtatttgtgacccgtccgagacaccctcggtcccttagagccttctcttggaattcctgagtgtgttgctgattccttagatttgactttgtaataattcttaaggactaacaatatgtgcaaagataaaagaaaaagttcactgaaactaacagtttggcacaattttttttctgtttgatagagaaaaatatatacatctttggtgtggtagagcaattcagaccttggtggacttaaattatttactgtgttcactttatgtatgtgtgtgtattgctggtgatcaatcaaatccaggcccttatgtgtgcgtgtcgccacgaaatacttaaactgctacaccacggaggcaggtcgttttaggtcaggagtgagaggtttgttcgtttttgatagctatttttactagttcactgtcacgaagatagtttgtaaactaataatttttctttacacttgttatagtcccacacagcaggcattttttggacacaagattgccaatggatgcattcaaatgagtccactgaagttatgaaattgtatatgtatgcacctaagtgtttatgcatttatcttagattttgtcttattgtaaactgtaatctttttgtaattaagaattctttttctcaacactgtttcttgataatttcaatattagatttaaagaccagcttgaggtgtcaagcatttattcccagtttgtgattgacacctcctcccacgcttgtcactgtgtcttatttattgtagatttgatctggaggaagtgaagcacatggaactgttccagaagtggtctgtcattcccgttctcggactaatagagacctctctctatgacaatgtcctcttgcacaatgctcttttacttcttctgcaagttttaaactcttgttccaaggtagcagacatgctactggacaatggtctactctatgtattatgtaatacagtagcagccctgaatggattagaaaagaagtaagttttaaactgttaattaaaattacatctgataagattgttagaaggggaaatagttaataggttaccttaaagagttggggtttattttgtaatgctttcaaataatttctttcccacagaattaaattaagttggagatggcattttttttcatcactttgaataatgtttgactaagaataggatgttcctacgacctgttttggggtacttagaactgaagacagtaaggctactctctgatgtttatcaagcttccacagttgtctctgaggaagcgattagatagggctgctcgctgatctatacggagctcagaaacagcagagggctctgtagcagctcagtgaactcacttgctgatgcaacactgcctccatgcgcagtttacagcaatggagaatatagtagcactgctaatacaaattaatctctagtagtcaaaagtacactggcaaagggataagagctgccactcgagttaagagctttgaaaaataattagattttgtatttttggtgtccacatctgatgtatagtttaacaatttttattagtgtcctattaaaatgtgaatcttaagatgcaccatcatgttgtatgccaaagcactgaatgctgtcaatatttttgtagagttcagagcatatcagtgattgtctggggcaaaggcagactccttacactctctaagttcagctttaattgggcacttattgtttgtagggttcatgtgcttatgtttaataaaactagaaacatgaggtattatgtttcctcaggacatttagacttgattgcagtgcagtgcataaaattggtaaaactgggaaggtgcctataggtttgttctgaaagcagtttctcctaaaactaagttagcccgattgaccctgtgtgggactgtgttagttgtccctgtgaaagttatatttctaacccttacttatttgaaaaaactaaatataaagtatttgggcctggtgtcataacctgagtagatcatcaaggttaagcttgtgggcagagtaattgattcatactcattatgtgttcataagtgattaatatatattcaagtttatccttaatttaacttcaatataagttcacgcttataatctctaaaatatctttcatttatatagctgagctgcagagccgttaatggattctttcagattcactgtcccttagtattgttgctataccctatccttcacccttcatgtagaccaggaacctgtgtgagtgttctctgtgtatcttgtgttaatctctagctgttgtttatgttgctctcttaacctgtatctttctctacaagactgtattttcaacagaagtcaatgtgccttacttgcattcctagtgggcagggtatattgcttgctgtatagagtaaacatgaacagttcttaaatcattgcatgctggtagcgtagagtttaaccagttctttgtcttttaatttttcggctgttttgcttatagtatcttctgttttgttttggactcactttagcattcctgtgaacgaatacaaattgctcgcatgtgatatacagcagcttttcatagcagttacaattcatgcttgcagttcctcaggcacacagtattttagagtgattgaagaccttattgtacttcttggatatcttcataatagcaaaaacaagaggacacaaagtaagaatggattttaatggaatttttctcataacttttactgaagatttaaagttaattatgtgttggtattaattggtatttaaagcaacctttaaattgttgaaaatagagtgattgatggtttgatgtaattagtagttggcaatacatcactggcagaaactagtaattttttttaccaagtagaatacaaaggcatatgttggaagaataatgggaatgctagcgtgactcatgagtgaaagcgtgtagggtattggagcttttgctttatacaaagttattggtttttgaaacagtcatttaaagtgaaatcagtttaggatttatcattttttctattcaaatttttatagttgtagctagatatggtgatacatattcaagagatggaggcaggatggtcagaatttcaaggtcatcttcagctacatagcaggctaacctgggctacaggaaacatgtctcaaaaatatcaaaaaatttgtagtgaccatatgggaatttattttaacattatttttaaatgtagcttagaaacactaacatcaagaacccatgttgatgaaacaattttaacttgtgtctaaggccttttcatttagatattgaatattatagcttgaatattaggttatatgccttagatgttagataatatattaaataagtttagttaaaagagttaaacaattatgatagcttgaaaacattctagtctctttgggtttagatatggctttggccctgcagcttagagttctccaggctgctttggaatttataaggagcacagccaatcatgactctgaaagtccagtgcactcgccttctgcccaccgccattcagtgcctccgaagcggagaagcattgctggtgagtaccaagatgccactttaaaattagaaatttaagataactatactttcctatattctgatgccatttacattaagaatatttttcttgctgagcatggaggcatgtgcctttaatctcagcactggggaaacaagggcaagtgtgtttctggagtttgaggccagctgggtctaatatatcaagtctcttgtctccaggagccaaggaattaaacacgaggtccttggtcctatgaaggctcgatagatgcctcagtgtaggggaattgagggtggggaggtaggagtgggtgggtggttagaggaataccctcatagaagcgggaggcaggaggaagtgacagggggtttctgggaaggagggacactgggaaaggggataacatttgaaatataaataaagaaaatatccaattaaaaaaagaagcaataaataataataaaattataaactctgaggacgttttcctctcagcagaaaccactgtacctgaagaggctacatagaccatgcccatgttttatcctaatggaagccatcaaggttttctggagatgcatgatatgatcagataggcgtccattgtatagggaggactctgacttctctggggaatatggacttgaagaaagcaaagtgcagaacctgggcgggggcgggggcagcaatcaaggtagactgtggtgtcttttagacaggcagaatgcacatggtatggagctgactgcggatttgtatgtatcaccaaatagtaagtgctgatgcgtttcccacaggacatgttgctgcttttatagaaacataaactagaaagacaataaaaacaccacaaacctaggatgtatgttcatgttcacataaatgtatacacatgtctcttgtctatgtgcagtgggtatgcgtaagtgtgtgtaagaacgtaatgttactccaggttctgctcagtgtctgtctatagcagctgctgtgcacacacttggatgtatatataaagagagtgcttagtgggtttcctgtatttgttctcatagttgttaaggctttttagtccaaacctttctctccttgtactaattttctttttttctttctgtatgttcaatgcaatgcaaaaatttaaagccatgtgataaaaaagcccatccacggaaaatgcttctaaatatgtaataatgtgtttaagttatgctaacgtgacttataaaaatccacataactaaacttactgcccctatgtattcttccttgtttaatatctagacagtctctcttcttgcaccactctcccattgtacttgtcatctatcccaggtaaaatgtgcccttttcagatctaagtgtggtgcacagtttcctatctgccatgacaaggaatcttgtttcttccagcagtattacacctaggttttccatccttaagttcccagaggatgtagacactgctatgtaccaggttaatcttccttcagcctcacatgtggatcgctctgcttgccagtcccaagttcctgtcaacctagtgaataggaccagattcaatactttgagacacatacacagggggaagggggggagggggaagagaaggagggaaagagagagagagggaggagggagagaagagggagaggcatagggcaaggtagagtgatggagagatatttttcctaaatggtatcatactgtaccagctgtttataaagggacttctatttttaatccatatagacatctttttacattaaagaacacgttgtttggtagttcctgtattgtatgttgtgatcttcttccctagcttttttgctttgctttactaacttttcctattagtgtgcagtttttgaagtaaaaaaactcaattgttactttaatgcttgaagatagaggaagtggtagggtgttatttgaagtgacatattcatgcaagtgtcattcatatgagtaaatgatagagtggtaaaattagcacacgaatgaactttgtatttaaccaataaaagcaatactaacaagaatgattctttattcttttgatgaatgagataggcattgtattttatattcattattttccttaattcatacaataatgttcttgattcattttttcagccattaaataattaccgagtacctgccatgtacaaattcctgttttacctgactccatagaacaggggaagtgataaaagcatataaagaaatgtatttctatagtatcagatagtgatgactctcttcctgtgagataagctctgctttgttctcagtatacatcttataaacaaggaaactggggcttagaaaaagaagcaaacaagactgtttctgatccatgaggctttaaagcatgagtaccgaagcacacgtccacgttcacaaatatagaatgagagtcttactctgtctactaccttgccatccctgcattataattggattatacacaagaaatctgtggataatatgaggatgaacctatctcaatgtttagggatattatctgacaatattatttttaatatctccaggaattattttttgtttcttctttacctcaaagatgactctagtcaccaaaattattaactgatttaaaatacatagtagtgagcaatctaaaaaaaaatattaaaacctgccataatttagtcagatgcaaataatttgtaaaaatgtcatttatggaaattgatgcttgtttttataattcaaaacaaaggttcaattccagtgaagggttctgttactccttatccaccaagacgtcactttggttcctatggtcaacttccgatgcccttcttcagtccattagatcaagactcccctcagctctctcctggatgcaccacatgtgccgcatcccccagagcaggtgcagtagtgcaggaacagccctcggcctcacgcaatcatctggggcgctgtttctcaggaaatgctttccaaatgatgtgtccacccataatcagtgtgctggcaaatcactgggcttgcatctactctgtgatctctgcgttctcactgactgatttcttatttgtcgctatgtatgattttccaacctataagcttcaatggtaattacccagacatagtatcattattatttatcaccatcttttactaaaatatctagttctttaaaactgttgatgatcttggaaaacaaggaagtgaaacagtgaaaatagtctatcagatatcaaagccactagtacccgtctgatattttggatttttcagaagactaagacttggagaaatgataagtaccctcctgttactagctctttgctattactttagactttgaatccagaagtactgttccacttctttggagaaagaaaaagatactaatttctcattctcttttcctaaatgtaagttaattttgtaataaaaagtttttcttttaataaccaataagcaaaacattttagtgtaaataagtccattgctcattattaactatggcattgggtaatttatgtacttgaaggttctcgcaaattccctctggctcagacagagtctctgctgatgaagatgcgctcagtggccagcgatgagctacactctatgatgcagaggaggatgagccaagagcaccccagccaggcctcggaggcagagctcgctcagaggctgcagaggctcaccatcttagctgtgaacaggattatttaccaaggtatcttagaccccactcctcccttcagtggtggaccacaggggaaatatatcatatggaagtgattaggtttcctttttttaatttatttttttaattaggtattttcttcatttacatttcaaatgctatcccaaaagtccccccagaccctccccccccccaacttccctacccacccactcccacttcttgaccctggcattcccctgtactgaggcatataaagtttgcaagaccaaggggcctctcttcccaatgatggccgattaggccatcttctgatacatatgcagctagaggcacgagctctggggtactgcttagttcacattgttgttccacctataggattgcagatccctttagctcgttggatactttctctagctcctccattgggggccctgtgttccatccaatagctgactgtgagcatccacttctgtgtttgccaggcactggcatagcctcacaagagacagctatatcaggttattttcagcaaaatcttgctggtgtatgcaatggtgtcagcgtttgaaggctgattatgggatggatccacatctgggttcttttcagcttctggctagtataagtaaggctgctattagcatagtgaagcatgtgtccttcttaccaattggaaaatcttctgcatatatgcccaggagaggtattacgggatcctcctgtagtactatgtccaattttctgaggaactgcgagactgatttccagagtggttgtacaagcttgcaatcccatcaacaatggagaagtgttcctctttctccacatcctcgccagcatctgctgtcacctgaatttttgatcattctgactgatgtgaggtggaatctaagggttgttttgtatttccctgatgattaaggatgctgaacatattttcaggtgcttcttagccattcggtatttttcaggtgagaattctttgtttagctctgagccccattttttaatgaggttatttgattttctagagtccaccttcttcagttctttatatatattggatattagtcccctatctgatttaggattggtaaagatcctttcccatactgttggtggcctttttgtcttattgacagtgtcttttgccttacagaagctttgtaattttatgaggtcccatttgtaaattcttgatcttacagcacaagccattgctgttctattcacgaatttttcccctgtgcacatatcttcgaggcttttccccactttctcctctataagtttcactgtctctggttttatgtggagtttcttgatccacttagatttaaccttagtacaatgagataggaatggatcaattcgcatttttctacatgataaccgccagttgtgccagcaccatttgttgaaaatgctgtcttttttccactggatggttttagctcccttgtcaaagatcaagtgaccataggtgtgtgggttcatctctgggtcttcaattcaattccaatggtctacttgtctgtccctatatcagtaccatgcagtttttatcacaattgctctgtagtaaagctttaggtcaggcatggtgattccaccagaggttcttttatccttgagaagagtttttgctatcctaggttttttgttattccagatgaatttgcaaatttgtcttagtcagggtttctattcctgcacaaacatcatgaccaagaagcagttggggaggaaagggtttattcggcttacacttccatactgctgttcatcaccaaaggaagtcaggactggaactcaagcaggtcaggaagcaggagctgatgcagaggccatggagggatgttctttactggcttgcctcacctggcttgcttagcctgctctcttatagaacccaagactaccagcccagaaatggtcccacccacaaggggtctttcccccttgatcactaattgagaaaatgccttacagttggatctcatggaggcatttcctcaactgaagctcctttctctatgataactccagctgtgtcaagttgacacaaaactagccagtacattgccctttctaattcgttgaagaactgaattggaattttgatggggattgaattgaatctgtagattgcttttggcaagatagccgtttttactatgttgatcctgccaatccatgagcatgggagatctttccatcttctgagatcttctttaatttctttcttcagagacttgaagttgttatcatacagatctttcacttccttagttagagttacgctaaggtattttatattattaatgactattgtgaagggtgttgtttccctaatttctttctcagcctgtttattctttgtgtacagaaaggccattgacttgtttgagttaattttatatccagctacttcactgaagctgtttatcaggtttaggagttctctggtgggaattttagggtcacttatatatactgtcatatcatctgaaaaaaaaagtgacattttgacttcttcctttccaatttgtatccccttgatctccttttgttgtcgaattgctctggctaggacttcaagtactatgttgaaaaggtagggagaaagtgggcagccttgtctagtccctgattttagtggaattgcttccagcttctcaccatttactttgatgttggctactagtttgctgtagattgcttttatcatgtttaggtatgggccttgaattcctgatctttccaaaacttttatcatgaatgggtgttggatcttgtcaaatgctttttctgcatctaacgagatgatcatgtggtttttgtctttgagtttgtttatatagtggattacgttgacggattgccgtatattaaaccatccctgcattcctggaataaaacctacttggtcaggatggatgattgctttaatgtgttcttggatttggttagcgagaattttattgaggatttttgcatcgatattcataagagaaattggtctgaagttctctatctttgttggatctttctgtggtttaggtatcagagtaatagtggcttcataaaatgagttggatagagtaccttctacttctattttgtggaatagtttgtgaagaactggaatttgatcttctttgaaggttgatagaactctgcactaaacccatctggtcctgggctttttttgtttgggagactattaattactgcttcttttctttaggggatataggattgtttagatcattaatctgatcctgatttacctttggtacttggcatctgtctagaaatttgtccattacatccaggttctccaggtttgttgagtatagccttttgtagaaggatctgatggtgttttggatttcttcaggatatgttgttatgtctcccttttcatttctgattttgttaattaggatgctgtccctgtgccctctagtgagtctagctaagggtttatctatcttgttgattttctcaaagaaccagctcctcgtttggttgattctttgaatagttcttcttgtttctacttggttgatttcgtccctgagtttgattatttcctgccgtctacttctcttgggtgaatttgcttccttttattctagagcttttacatgtgttttcaagctgctagtgtgtgctctctgtagtttcttttttggaggcactcagagctatgagttttcctcttagaagtgctttcattgtgtcccataagtttgggtatgttgtggtttcattttcactaaactctaaaaagtctttaatttctttctttattccttccttgaccaaggtatgattgagtatagtgttgttcagtttccatgtgaatgttggctttctattatttatgttgttattgaagattaatcagccttagtccatggtatctgataggatgcatgggacaatttcaatatttttgtatctgttgaggcctgttttgtgaccaattatatggtcagttttggagaaggtgccatgaggtgctgagaagaaggtatatccttttgttttaggataaaatgttctgtagatctctgctaagtccatttgtttcatcacttctgttagtttcactgtgtccctgtttagtttctgtttccacgatctgtccattgatgaaagtggtgtgttgaagtctcccactattattgtgtgaggtgcaatgtgtgctttgagctttactaaagtttctttaatggatgtggctacccttgcatttggagcgtagatattcagaattgagagttcctcttggaagattttacctttgatgagtatgaagtgcccctccttgtcttttttgataactttgggttggaagtcgattttatttgatattagaatggctactccagcttgtttcttcagaccatttgcttggaaaattgttttccagcctttcactctgaggtagtgtctgtctttttccctgagatgggtttcctgtaagtagcagaatgttggttcctgtttatgtagccagtctgtttgtctatgtctttttattgggggaattgaatccattgatattaagagatattaaggaaaagtaattgttgcttcctattatttttgtttttagagttggcattctgtttttgtggctgtcttctttttggtttgttgaggattactttcttgctttttctatggcgtatttttcgtccttgtatcttttttttctgatattatcctttgaagggctgaattcgtggaaagatattgtatgaatttggttttgtcatggaatactttggtttctccatctattgtaattgaaagtttggctgggtatagtagccgggactggcatttgtgttttcttagtgtctgtataacatctgcccaggatcttctggctttcatagtctctggtgaaaagtctggtgtaattctgataggcctgcctttatatgttacttgacctttttcccttactgcttttaatattctatctttatttagtgcatttgttgttctgattattatgtgtcaggtgaaatttcttttctggcccagtctatttggagttctgtaggcttcttttatgatcatgggcatgtcattctttaggtttgggaagttttcttctataattttgttgaagatatttgctggccctttaatttgaaaattttcattctcatccactcctattatccgtaggtttggtctcttcaatgctctgtggcttctgcctgtcccagaagctgttagcttctgtagtccacactctcacctgcacagaccagtctctgagggatccggcaaccaagatggctcccccaggtgctctggcaaagccctcccaggcggggcggacacctcaggtttccttttttaaagacagcattgagttttctcttctttatgaccacagattaaaggagctttaggtttgagactaatattctacttcttaatgtgttaattgctagtctgggttggtcattgattttaaaacaatatttttcaacctttcttttgacaaagtaatagattcataggcagttgctagaaataatacagagatccagcaacttggtatctagtttttcacatggaatcttgtgagattgtaatacagtgtcactttcaggaaggagacatgaatatggtcaaagaggacaatttcattcccataatgaatttttgcctttttatgagcaaacccactttctccctcctcagtccttacctacctccaatttatcctctgtttctgtatttctgtcatttctaaaatgttttacaagacagccagaaacaagtgattcttgcctgtcatccaggtactcagaggctgaggtaggagagctgtctaagcctaagaattctagactaacctagcaacacagccttaaaaaaaaatagctagatgtagtggtacaggccttaaatcctggtgctggggaggaaaaggcaggcaagtttctgtgagtttgagaacagcctggtctacaaagtgagttctgggttagtcagaaatacatagtgagatcctgtcttggggtaaaaagtgtcttatataaatatgatattaagtctgttgccatttttattcagcataattctctggagagttgtcctgcttagtttgaatgaatcagcaatgtattcagttggggttttgtttgttttatgggacagtagtgccatgatatggatataccagagtctatttaaccatttatctattgaagtgcatgtaagctggttttaattagagttatttcaaacttcctagcaaacttcaagtacaggtttttgtgtaaatataagcctttattatctgggataaacaatcaaggctcatttcctgggctatatgtcagttttaaccttttctgagtggctatacagttttatatgtccctacatttacaatatataagtagttcaggttttactgtattttctccagtatctggagttgtcagcattttgttttcaccattctactagatgtatggaggtatcttactgttattttaatgtgccgtcccataaagccagtgttaagctaatacctagaggattcattaagagacctacaaaaattaaccccagcaataaaagcactatggctgtgtcccggggtgcatacttgggaaggctagggcagtagggccacacgtttgaggccagacttgtgtacaaagcaagcttgtttacaaaggaaaaaataattctatagctaatattcaaacatacatatacactatatatacatatatatactggtcacatacacatacataggcatgcatacgtacacacgcgcacacacacacatacacacacacaccacaagcacaactatatcagaatttatgaatgttacctatctttaacattcgactatgtatatgtatatcaaacaatcaagttgtatactttatatataatatatcatttcttagagttaggcctcaataaagctgaaaaacacatattagaattctaaaaactattcaaggggactggagagatggcataggagttaagaccacttgttcttacagaggacccatgtggcctttcagtttgttgatgatttttttcaagagtcctacgatcttagcaaattttaaccatttcatcttcactagtaaatttaacctttatagtttcataatttaagtacttttaaatgtctatattattttaaataaattgtttccctcttctgtcacattttatctcctttaattaatacatttaccacatttatactataataactcagttagtaatacagaagattaagagagttttttaaagttttgtttgtgtgagacagggtcttcaaactcacagagatatgcctctctagtgctggggaaataaacacgtttcaccatacctgaccagaggatttttttaaaaatcaattaaaatataattatatcatttcctccctctgtttcctatctctagcactttccatgtctcccctcactgctccctcttagatttatgcccatctttttctttaattatgtgtgtgagtaatacataaatgcaacttgttggatctgtttagtgttgctggtgtgtgtatgttctctgacttggtatcagataaccatttaaagggctctgtctggagaaggctaattctacctccttcaacagttgttaattgcctgcaacccagtggtgggactctaatttttcccataaactttgacatgtcaactggtgtcattgttcagatcttgtttaagtaatcatagtgttgaaatttttggggtgcagtttccctttcatatccagaagataaaatcttaccaaagacttcatggtcttctggctcttacagtttttctactctaagttccacaatgttttctaagctgtaggtatacagttgtgttgtggatgtatcacttgggattggacaccaaatggccagtttttctgtgcattttggttagttgtggctttctgaaatgatctctctctctgtgctgcaaaaagaagcttctttgataaggagtgagagctatacttatacttttctgtgagtacaaggataagtgtttaaaatacaggcagaaattatactggtttaagaaaatggtagttacaggttctaatccaaaatttatggcatcgctggccactgatggttggctagatttataaataatacctggcataatttccttcctattgagcagcccttacatccaattagacagctgttgattactgtcaagatatacctttaagaatatctttctgtgttggtcattgtggttcataggtatcccaacctgattgctttccttccttggcaacttaaaaagcagcctacatgatgaaagctagccctgaggaagaagggttgcaggtcagaatcagctagaatcttctaaattctgtgtctaaagtgtatggtgttgtcagcaatagggacttgtcttcagagatcaacaaaggacaacaacaataacctatattgtcttgagagtctcttggactcccctaaccaccaacttgaaaggaggattttttatgcctagtactgaggtttttattagattagtctttggctcttagggattataagtagagtaatttcattaaatatatgtacaattatatgtaattttagctaaatatagaataagttctcatggctatgtcagatgtcctcagtgttacttatcccacctcttgagtattttcaccaacatcattaccatacatagtagatacctatcaatgagttaacttatttttattaaattcttttttaattcaaagagttgaattcagatattattgacattttgagaactccagaaaatacatcccaaagcaagacctcagtttctcagactgaaatttctgaagaagacatgcatcatgagcaaccttctgtatataatccatttcaaaaagaaatgttaacctatctgttggatggcttcaaagtgtgtattgtaagtaaattaatgacttgaaaatgtgcatttacacaaaaggagtagagatctatatatgtgaactctgggtttctaaatttatatttctttgtgctttgtacctgaaacaatttaaattcgtttttctgttggggtaaggtcattgttttgttttgaagtaaggattcactatgtagcctaggttgactttgaactcatatttctcatttctcagtctcatgctaattgacattgcaggtgtgtgccattatgcctaacggggttttaataatagagtgatatattttgcttggctaacctgttacaaaatgaagaacctcatgtagtatcagggaggagtgggattttgatgattgctgtgtttgtaaatgaatagcctgtttttaaagggctttatttataattacatttctgaaatattgaaaagtttagatcttgctataagcatatccagtaccttcaaaatgatatagagtatattgatggtgtctggcttcactttctatcatctcacttgagtttctttgggtcattcatacttgattatgggggaaaaattgatcaattcactctgtcagtaacactaaaggccaatataattctagaataccatgagtcaccactgccagtctctggatctaaactggattttagtgtccatctctgatcattaagtaaactctagtttcacttagactaaaatcactcaagcagagatcttaagagtaggagtaattagaaagccattctaaaattgtgtttgagctctgatatatactgattccagtattaaattcaggtgatttggtcaagatgaggctactggtagagctacagttaaaacaacaactagggaaaactgatgatcaatttctatttagtgctacatttataactatggtactcactatggtagtactgactcatttttattatgagttccttgttttctatattgtaaaagcaaggtggatttacttcccattagtctctgattgttttcatttgatttttagttgataaattgaaaaatgactcatgacattagcttctccttctgtactctctttttgtatttgtgacaaaaatatataaagtgaatattgtcacatatctatttcttaaactctcatttgtatggatatgtatgagtgtctaactttaaatgttaaatctagaatgaattgtattctatggtcttccttgagtttctgtgaggctaatatattattgcttaagaagtctgatcctgagctgtccagcttgctcagcaggtagaaacaccacacaaatgttaaccacctgatttttatccctgatcccatgtaaagatggaagaagagaacccctcaagttgtcctttgactgccacatacttgctgtggcactcaaacaccctctctacacacagtgcagctacttctgcagctactgctactgctactgctactgctactgctactgctactgctactgctactactactatttagtttttaaaagtctgatcctaattcactccaattttgacttagggttcaagtaaaactagcgtttctaagcagcagtggactaaaatcctggggtcttgtaaagaaaccctccgagaccagcttggaagattgctagcgcatattttgtctccaacccacactgtacaagaacggaagcagatacttgagatagttcatgaaccagctcaccaggatatacttcgtgactgtcttagcccctccccacaagtaagtatctcagcatttgataaagcccttcaaaacaaaaatggaaattaaactatgttcatgctgtcaggagtgtagttttcttaccaaacaaatttaatctgtgaccttccttcctatgctttttaggcttgaattgacttcttcatggtcatttcccagctatttttcagggcttagattaaacattttatatttgagttcttaaaaggtctgtatggttgtttgttgccatattgtgaagaattttcttttttaatacatttttaaaaatctaattatgttgctctttccctccagtccctccctgcttccctcctcccatactctcaacttcatagcctctttttctttgtttattattgttccatatatgtgtatatgtatgcataaatatatagacaacctgctgagtccatttttgttttgagagcccttcactctttttgctttttgtcagacagcatgtcctctgtaggaaagttctttgtgcctttccaaagctgcatacaagctttgttctgttggtcttttcctagagttggagagctcacagctgcttttctccattcagctcctttgtgatgaattctcttcctttcaagatagtttcttgttgctgccccttgcagcctcttttagtcctctgagactcactctgaacaaggccctctcctttgtcaccacttagcccttgactagttcactctgtatttcttctgaccctctcttcatttttttttgttagtaattttttaattggatattttatttgtttacatttcaaatgttatccccttttctggttgcccttctgcaaaccccctatcccatctcccccttaccctgcttctatgagggtgctccccaacccacctacccattcctgcttcaccaccctaccattcctctactctggggcatcaagctttcacaagaccaaggacctgccctcctattgaagtcagataaggccccttcagctccttcagtccttctaactcctccattggggtccctgtgctcagtctgatagttggctgcaagcatctgtatctgtattggtcagagcccctcaggagacagctatatcaggctcctgtcagcaaacacttctcagcatccacaatagtgtctgggtttggtatctgcatatgggatggatccccaggtggggcagtctctggatggcctttccttcagtctctgctccactctttgtctctgtatttcatttagacagaagcagttctggattaaaaatctggagatgggtagttggccccatccctcaacttaggggccatgcctaacttctggatatggtctagataggttctccctcctctttgttgggtatttcaactaatgtcatccccgtggggtcctgcttcccaggcatttgggactttctgattgctactcccagtttcccatcccccattgctatacacctctgtttaacatcctgaccctctgtacatcatcttctccatctcctcccatacccgattctgcccctctttttcccctccccacctctctttctcccaaatccctcccaccctatacttcccttgattatattgttcctccttctaagtaggacttaagcatccattctttggtctttcttcctcttgagcttcatgtggtctgtgagttgtatcgtgggtattctacactctttgcctaatatccacttatcagtgagtacatatcatgtgtgttcttttgtgactaagttacctcactcaggattatattttctagatccatccatttgcctgcaaattttgtgaggttattattttgaatagctaagttctactccattgtgtcaatgtactacattttctgtatccattcctctattgaaggatatctgggttgtttccagctactgggctattataaatatagctgctatgaaaatagtggagcatgtgtccttattacatgtttaagtattttcggggtatatgcccaggagtggtataggtgggtcctcaggaagtactatgtccagtttcctgacgaatcatcagacttatttccagagtggtactgtctctgtgccctctggttagtctggctaagggtttatctatcttgttgattttcccaaagaaccagctcctggtttgattgattcttggtatagttctttttgtttccacttggttgatttcagccctgagtttgattatttcctgctgtctactcctcttgagtgaatttgcttcttttctagagctttcaggtatgttgtcaagctgctagtgtatgctctctccagtttctttttggaggcacttagagctatgagttttcctcttagcactcatttcgttgtgtcccataagtttgggtatgttgcggcttcattttcattaaactctaaaaagtctttaatttctttctttatttcttccttgaccaaattatcattgagtatagtgttgttcagtttccatgtatatgtgggttttctgttgtttttgttgttattgaagaccagccttagtctgtggtgacctgatactgtgcatgggtttatttcattcttcttgtgtctgttgaggcctattttgtgacctattaattttggagaaggtgccataaggtcctgagaaggaggtctgttcttttgctttgggatgaaatgttctagaaatacctgttagatccatttgattcataacttctgttagtttcactgtgtctctgtttagtttgtacttccatgatctgttcattgctaagagtgaggtgttaaagtcttctacgattattatatggagtgtgatgtgtgctttgagctttagtaaagtttcttttatgaatatgggtgcccttccttgcatttggagcatagatgctcagaattgagagttcatgttggtacttttcctttgatgagtatgaagtgtccttccttgtcttttttgataacttttggttgaaagtcaatattatttgatattagaatggctactctaacttgtttcttgggaccatgtgcttggaaaattgttttccagccttttactctgaagtagtgtctgcctttgtcactgaggtgggtttcctgtatgcagcaaaatgctgggtcctgtttacctatctagtctgttagtctatgtctttttattggggaattgagtccattgatgttcagcgatattaagaaatagtgattgttgcttcctgttatttttgttgttagagctgggagcatgcttgtgtggctatcttcttttgtgtttattaaaaggttactttcttactttttctagggtgtagtttccctccttgcgttggaattttccatctattatcctttgtagggctggatttgtggaaagatattgtgtaaatttggttttgtcatggcatatcttcttttctccatctatggtaattgagagttttggtgggtatagtagtctgggctggaatttgtgttttcttagggtctgtatgacatctgcccaggatcttctagctttcatagtctctggtgaaaagtctggtgtaattctgataggtctgcctttatatgttacttgaccttttttcccttacagcttttaatattctttctttgttttgtgcatttgaagttttgactattatgtgatgggaggaatttctttctggttcagtctatttagaattctgtaggcttcttgtatgtttatgggcatctttttctttaggtatgggaagttttttctataattttgttgaagatatttcctggcccttaagttgggaatcttcactctcttctatacctagtatccttaggtttcatcttctcattgtgttggatttcctgaatgttttgggttagagtctttttttttattttgcatttcctttgactgttatgtcaatgttttctatgatatcttctgcccctgagattctttcttctatctcttgtattctgtcggtgatgctttcatctatgactcctgatctctttcctaggttttctatccagagggttgtctccctttgtgatttctttattgtttctagttccatttttagatcctggatggttttcttaaattccttcacctgtttggttgtgttttcctgtaattctttaagggatttttgtgtttcctctttaagggcttctatttacctgtgtttgcctgtatttctttaagggagttatttatgtccttcttaaagccccctatcaccatcatgagatgtgattttaaatcagtgttgcttttctctggtaatcagaaccatagatcagttcttgttaccccagttccaccagaactgggttctgatgatgccaagtaaccttggtttctgttgcttatgttctttcccttgcctcttgccatctggttatctctggtgttagctggtcttgctgtctctgactgtagcctgtgtgtcggtactcctggtagaccagttctctccaggaggtatttgggtatgtagcactgtggcacagaatcaactcctggcacatacagaaactggaaggttcgctcccaggctgctcctcggtttctgtgtcctgagggctccgggtgggtcccttggagcaaaagtagtgatgatcttacctgtgctcacaggtgtgtccacactcctggtagaccagctctttcctggctttatttggctaaagtgatctttctgtctcccatgatgtctagtttttgtgggctgtaaaaaagatcatttcacatgaatcctaacaccttttctcatcaatcaagtgttgatcaaaggatactaaaatgagatattagacacaacttactgtttgaggtcagatattttttgcatattattattttgcaccccaactatccagaaacatgtcgtaatcctcctgctcagcctgccaatgctgaggtctaagccagtgttcctgactgttccccagatagtgtctttttaaaagataatttagaatgtcactgaatactaagctgaaatatttttaatgttataaaacgaacattattttaaagacatgtagcaaaatactccagtcgtgtaccgtttttatttgccaacttttcagtgcttttattctcgcagcatctgttgcttttccttttttggtcaggtagcagctgtcttctgactaatttaaaatgctgcattgaactaagctttgctgctttcactattgcttatgttcatctgaggcttttagcaacatatgattcagcatgttagtttaaatatcatctaagatgtaatcgtttctagaaccatttgttgacatttaattcaattcatttttttaaatgccataaagctaaattcagtcatgtttgtatcaatgaagatttctaaagtaaaggacatgtgtgcagtttgttggcataattattgtctaatattatgtacatgtgacaaacagatgtgatagacagaacatgaaggcccacccaacaaaactaggaaccaaaatttgatttaagtttgcacttcagaagacagctgtcatccccttaggaactctgatcttggctttaggcctgttcgtagcctggcccacactggccctccacttggaactcatgtggaactgagaggctcagggttggcatctcaccttcttctactgagggaaactcagaggaaagggaatggaaatgcacttttactttaaggttaaaagacaagtttctcgtctagcttgtggttgtgtcttttcctttatccccagtttattatctatttttccttaacttgttctccccagaagctgagtaactagattgcttcatgtcagccttttattaaaggttcctaatacacacagagaattagaataatatggtaactaccacataaccctcatattaaatgtagatttagtattttacagtgtctttctcacattggtgtcatttctttttttagtttttaaaagtagactgtagaaatcatgacattttcttttcttttttattagatattttcttcatttacatttcaaatgctatcccgaaagccccctatcccctcccccaccctgctccctgacccacccactcccgcttcctggccctggcatttttctgtactggggcatatgatcttctcaatatcaagggcctctcctcccattgacggctgactaggccatcctctgctacatatgcagctagagacacgagctccgaggggtactgtttagttcatactgttgttccacctatagggttgcagacgccttcagctccttgggtactttctctagttcctccattggggccctgtgatctatccaatagctgactgtgagcatccacttctatatttgccattggtgtagcctcacaagagagagctatgtcagggtcctgtcaacaaaatcttgctggcatatgcaatagtgtctgggtttggtggttgtatatgggatggatccttcggtggggcagtctctggatagtctttccttccatctccgctctgaacattgtctctgtaactccttccattctaagaaggagtgaagtatccacactttggtcttccttcttcttgagtttcatgtgtttttcaaattgtgccggatggtggtggcacacgactttaatcccagcacttgggaggcagagacaggaggatttctgagttcaaggccagcctggtctacagagttccaggacagccagggctatacagagaaaccctgtctcaaaaaaacaaaacaaaacagaacaaacaataaaagcaaattgtatcttggatattctaagtttctgggctaatatctgcttatcagcgagtgcatatcatgtgtgttcttttgtgattgggttacctcactcaggatgatatcctccagatacatccatttgcctacgaatttcatgaattcgttgtttttaattgctgagtagtactccattttgtaaatgtaccacatgttctgtatccattcctctgttgagggacatctgggttctttccatcttctggctattataaataaggctgctatgaacatagtggagcatgtgttcttattaccagttggaacatcttctgggtatgcccaggtaaggaattgctggatcttctgttagtactctgtctaattttctaaggaactgccagactgatttccagagtggttgtacaagcttgcaatcccaccaacaatggaggagtgtccctctttctctacatccttgccagccagcatgtgctatcacctgaatttttgatcttagccattctgactggtgtgaggtggaatctcagggttgttttgatttgcatttccctgatgattaaggatgttgaatattttttcaggtgcttcttagccattcagtattcctcaggtgagaattctttgtttaactctgtagcccatttttttaaatagggttttttgattttctggagtccaccttcttgagttctttatatatattggatattagtcccctatctgatttaggattggtaaagatcctttcccagtctggtggtggcctttttgtcttattgacagagtcttttgcctttatagaagctttgtcaattcttgatcttacagcacaagccattgctgttctgttgagaaatttttcccctgtgcccatatcattgaggcttttccccactttctcctctataagtcttagtgtctctggttttatgtggagttctatattacttttaaaagtacttttttctatcatttaataaaattaggaataattctgtaatatcaaatacctaatacattattaaatttcacctactgtattgtcgtgtcttttacagttgtaataaatcttacccaaccaactaactttagaaatatatttaaattatcattaaataatttaaaatcaaaactacaaatataattaaatttattattaaataatttaaacagaagaaataaaattctttataactaaaaccttattacttatttttaaagcatggagccaagttggttttgtatttgtcagagttgatacataatcatcaggatgagttaagtgaagaagaaatggacacagcagaactgcttatgaatgctctaaagttatgtggccacaagtgcatcccgcccagtgccccttccaaaccagagctcattaagatcatcagagaggtgagtctaccaatcagagttgttttttaggaaatccttttgagtacacttaacacagtgactgaaagattgttttactattgataatatcttgcaattattaatttttgctaatgagtttttgatcaggaaaggaaaaatagagttatttagggtaactttctattctctttggtttttgtcatccattatctatagacttcaatgaaggaaggattattattgagatttatttatcttatgtatatgtatatgttttgtctacatataagtctatttatcacatgtgtgcagtaaccttggagatctgaggagaaattggagttaaggtggttgtgagtcatcgtggggtgctgggacgggaaccccagtccttggcaagagctacaaattctctgtccccatgaaggaaagatttatgtagtgacaagcacattgaaacatacctgcacttaagattctttaacaagcaagtgaagtaagcaggtagctatgtaaattcaggaggctggggaacctagttaattattttgctatggttttaatgactcaaactataccaaaataagagggaaattataatattgtctaagtggcttatttatttaaatagtctggccttctgaaaataacttactaccttagattcgaaattactttgtaagactaagtgccaatattatatgagaaatagcaagtttaggagctcagaatatagatcagcttgtagagtgctcacctgaaggtcttgggtatggtggtatatacccgtagtctcagtactagggaaggtggcacaggaggattgggtgtttatggccaccctggcttacatagggagttcagtgctatcctgagatacatacaatcctgtctcaaaaaaaagaaaataaaagaaaacagagagtaagttttatacattactgtttcaatcttttaggagcaaaagaagtatgaaagtgaagagagtgtgagcaaaggctcatggcagaaaacggtgaacaacaaccagcaaaggtgcgcttccgtgttccagaggcctgtccttcccacgctgttcagggctcgacacttagcctcttttctttctttttctttaggtttgattttggaaacttgtggggttactttgtttgtatgtatgaatttgtgtttgtatctatgtgtgtgtttgatctgtgtgcacatatatctatatatgtggtatgctggagacggtactcaggttctccagcatgctagtcaaatgctataccactgagctgtatcccagcctgaggtgtactgttcagatacttaatgtttagtgaatacttaactttggaacaatcttgttggtttagtctcttccagaggctcgatttcaaatccaaggatatatctaaaatcgctgcagacatcacccaggctgtatcactctcccaaggcattgaaaggaagaaggtgatccagcacatcagagggatgtacaaagttgacctgagtgccagcaggcactggcaggaatgcatccagcagctgacacatgacaggtgtgcagtgggaacacgtggctgagcacagcttctatatgtgatgtgtaatagtgttttcattccagtactcacatttatacaattatttttttaaaagatttatttattgttatatgtaagtacactgtaactgtcctcagacatacctggagaggagagggtgtcaggtctcattacggatggttgtgagccaccatgtagtcactgggatttgaactcagaacccctggaagagcagtcagtgctcttaaccgctgagccatctcaccagccctataaaattatttcaatgaaactttttatctagactttttttcagtcttcaagaataacctcatgaggatttttttgttttttttgtttttaattcttgaaagaaaacaggcattagctctttcgatagtaaaattcatttcaattttaaaataaggtttttttcaaaaggatagagaaattgtcaaaagagtatatttgggaaatagctctttttctatcttagactttattaatatgatttaaaggtacattatgagggggctagggaggtggctcagtggttaagagtgcctccgctcttgcagaggactggcttcagttcctcagcacctgaatggcagttcacaacctacgtgcagctccagctccaggagatccaaactgtcatgtagcctcctcaggcagtaggcacacaaacaatccacattcatacacacaggaacaatgctcatacatgtaaaaacacatcttttttaaaagatgaattataagtgacaaaaagaagtcatgtatcattccttacttttaattgagataactagctacagtcaggtgatgtaatctagtagatacaggaaactggaagcagcacttgctccagaagggagcttgggaactggactcaggggtggacactcactttctttgtcagtctttattatacgtatatatttcttctgatgtacagaccgttgttttgtacttaagtaagcccattgtgtttatttgctcagtctttatgattttaaggttgtaagtccttcgatgaccactaagatgttttatttcaatttacagagcagtctggtatgacccaatctactatccaacttcatggcagttggatccaacagaagggccaaaccgagagaggagacgtttgcagagatgctatctaactattcccaataagtacctcctgagggacagacagaagtcagaaggtaacagtagcgttggccttggcctctgggcgggacaggtaacagttgctagataaacgctgtgtacgttttctccacaggtgtgctcaggcccccactctcttacctttttgaagataaaactcattcttccttctcctctactgtcaaagacaaagctgcaagtgaatccatcaggtagatctgagtccttgccctccttcacccttagatggatgtacagatttagcttattgtagactttatgtattgttggtaatactgtggtgttagggaagtcttaaaagagacttgagacaggacacagttgaatgacaaagtccagatgcatttgtaacattggggtttagtggatatcagtcaccagctctgccccttcctagcatatgtgtattttatagttgactttctagtctctgtaaagtagatagagttgctgctggtgctctccacaggagtggaatgtagtgacataagcctctctgcttccatttcctcactttgtaagtaggggacattatcatatacaggcttttatagtattattgaatttaaatgtgtcagcatgtactagttgttaatattgttgccatattcttttagttgtgattattgtatacatttaaattttttaattctatgtattttttttgcatgagtgctctgcatgtacacctgaatgccagaagagggcatcagatcctattgtagatggttgtgagccaccctgtgattcctgggaattgaacataggacctctggaagatcagccagtgctcttaaccactgagccatttctccatccccctattgtatccactttatagttagaaaccttacaccctaaaaagacaagtgacttgagaacagaaattttctgatcacagtgcccccgtttaaaaaaaagaaaacaaaaaaccaaacgaaaacaaacaaacaaaaaacaacaatgaaaacaagagcaaacacatacttcgttcacatattgaagtatgaatgacctaacatagtagtgtctagttgcattatgaaaccattcttaggtagccaaacccatatatctgcatgcaaactgcaggaatccttagcttgtcctaacaatttccatcttttcccttctgatgaatgttacataaatagtacatgtgcatggtctgggttttggcatgccagctcatgctactgaaactctaatcagctttgcattaatattttactagataaaaaatcttgaagtctaaaataaaagcaaaaaattcagtcatagcaattttaaacatgttttgacagagtgaatcgaagatgtatcagtgttgcaccatctagagagacagctggggaattgttgttaggtaagtggttttaaaagaatttcactcatattcacccttccttattcttaaataattttaagcagttttcataagaggtaaaattatttaactatcacttaggtggctttgctttgacattatagagacagcctccacgtataggatccaagtggatacttgaatgcatagatagtaccattttcccacatgtacatacaatgacaaagttaaactataaatgacccacagaaaaaggttaacaaaaataactaatgaaataacaccactaccataaaagctctatgtatgtgaggcctttcaaaatattttattgttctgtcacctttttaaagtacagttttatgtcttctcttggcatctgtagtttgctaacatcactactcttgcttttagaagctactattaaaggaaaataaaggtaatttggttataaggtgttgagtatggtagcagtcagcctggtgacctcacagcctgtgtgtgactagtagacttggagacacgacccaaggagacgagccgtatagtaagaatgagccactaattgggcagtcttaatacatgttttgtaaatattctaattttatttctacagtaattttggaaattcagctctcaaataccccctttttagcaataagacaaaggcacagaaagaagaagcaactgagatcttctgggtgctattttaaagtatttattgagtgtgtggaactgtttctagctgctggtattcagacgcaggccagaagacttcagaggttcctacctttcaccacattccataatgcacacacgtcacgcctttctgtccacttatttcctgcaggtaaatgtgggatgtactttgtggaagacaatgcctctgacgcagttgaaagctcggtgagtagtgacttaacttcatgtttacttatacctagaaaaatgtaaacctgcgtaaatccaatgtagacagagctcacctaccactgtgtggactagtatgaattccaaacatgtctataaaggctctttttaagggaagactgtcattgcctctttcattggacctgggtctcggcaattacagttatgattcaaattctaatgcactcctctcatttcctgtcaatcttcctcatcactgtcctcaacagtaacaaataaatactccctgccactcccaattcacaaccaggtacttttgccatcacaagaaaaggtagttttgttttgttctgttttttgttttaaaaattagatattttctttatttacatttcaaatgttatcccctttcttagtttccccttcaaaacctccctatccctttcccccttcgccctgctaaccagcccacccactcctgcctccccactccggcgtcccctacactggggcatagagccgtcacaggacggaggacctctcctcccattgatctacgccatcctctgctacatatgtgattggagccatgagtggcaccatgtgtactctttggttggtggtttagtccctgggagctctggggtactggttggttcatattgttcttcctatggggctgcaaacctcttcacccagaaaggcaatttttatataattgaataactcagccattttaatgtctacatagctgggtaataataacagagtcttctggatatgttagtgtttgttgtaaaaatgaagactgaattctcatattatgtcagatgaagctttcagtgttgtacaaaccgaaacaggtttagaaagagtgttttttattccgaaatcctctctgacatatgcagtgttatatatagtaggaggtttccagatagtgctattttttttttttttttttttttggcatggaagaatgactgtgtgctttgttttgatggggttttaggtgatgaaaaggcttttgtctgttttctttctcttagagcctccaaggggagttagagccggcatcattttcttggacatatgaggaaattaaagaagttcacaggcgctggtggcaactaagagataatgctgtagaaatctttttaacaaatggcagaacactcctattagcatttgacaataacaaggtaaatccactatcagtagatatgtaattattgaaatgatattgtgaccaacgatgctactagttaaataaagtttaattaaatgaaggttaattttcttaaattggtactctaagattatataaaatacatcttatatcttaatcttttttttccattttttattaggtatttagctcatttacatttccaatgctataccaaaagtcccccatacccacccacccccactcccctacccacccactccccctttgtggccctggcgtnnnnnnnnnnnnnnnnnnnnctccccctttttggccctggcgttcccctgtactgaggcatataaagtttgcgtgtccaatgggcctctctttccagtgatggccgactaggccatcttttgatacatatgcagctagagtcaagagctccggggtactggttagttcataatgttgttccacctatagggttgcagatccctttagctccttgggttctttctctagctcctccattgggagccctgtgatccatccattagctgactgtgagcatccacttctgtgtttgctaggccccggcatagtctcacaagagacagctacatctgggtcctttcgataaaatcttgctagtgtatgcaatggtgtcagcatttggatgctgattatggggtagatccctggaaatggcagtctctacatggtccatcctttcatctcagctccaaactttgtctctgtaactccttccatgggtgttttgttcccaattctaaggaggggcatagtgtccacacttcagtcttcattcttcttaagtttcatgtgtttagcaaattgtatcttatatcttgggaatcctaggtttggggctaatatcgacttatcagagtacatattgtgtgagttcctttgtgaatgggttacctcactcaggatgatgccctccaggtccatccatttggctaggaatttcataaattcattctttttaatagctgagtagtactccattgtgtagatgtaccacattttctgtatccattcctctgttgaggggcatctgggttctttccagcttctggctattataaataaggctgctatgaagatagtggagcatatgtccttcttaccagttggggcatcttctggatatatgcccaggagaggtattgctggatcctccggtagtactatgtccacttttcggaggaaccgccagactgatttccagagaggttgtacaagcctgcaatcccaccaaaaatggaggagtgttcctctttctccacatcctcgccagcatctgctgtcacctgaatttttgatcttagccattctgactggtgtgagatggaatctcagggttgttttgatttgcatttccctgatgattaaggatgttgaacattttttcaggtgcttctctgccattcggtattcctcaggtgagaattctttgttcagttctgagccccattttttaatggggttattcgattttctgaagtccaccttcttgagttctttatatatgttggatattagtcccctatctgatttaggataggtaaagatcctttcccaatttgttggtggtctttttgtcttattgacggtgtcttttgccttgcagaagctttggagtttcattaggtcccatttgtcaattctcgatcttacagcacaagccattgctattctgttcaggaatttttcccctgtgcccatatcttcaaggcttttccccactttctcctctataagtttcagtgtctctggttttatgtgaagttccttgatccacttagatttgaccttagtacaaggagataagtatggatcgattcgcattcttctacatgataacaaccagttgtgccagcaccaattgttgaaaatgctgtctttcttccactggatggttttagctcccttgtcgaagatcaagtgaccataggtgtgtgggttcatttctgggtcttcaattctattccattggtctacttgtctgtctctataccagtaccatgcagtttttatcacaattgctctgtagtaaagctttaggtcaggcatggtgattccaccagaggttcttttatccttgagaagaatttttgcaatcctaggttttttgttattccagatgaatttgcaaattgctccttctaattcgttgaagaattgagttggaattttgatggggattgcattgaatctgtagattgcttttggcaagatagccatttttacaatgttgatcctgccaatccatgagcatgggagatctttccatcttctgagatcttctttaatttctttcttcagagatttgaagtttttatcatacagatctttcacctccttagttagagtcacgccaagatattttatattatttgtgactattgagaagggtgttgtttccctaatttctttctcagcctgtttattctttgtatagagaaaggccattgacttgtttgagttannnnnnnnnnnnnnnnnnnnnnnnnnnnnnnnnnnnnnnnnnnnnnnnnnnnnnnnnnnnnnnnnnnnnnnnnnnnnnnnnnnnnnnnnnnnnnnnnnnnnnnnnnnnnnnnnnnnnnnnnnnnnnnnnnnnnnnnnnnnnnnnnnnnnnnnnnnnnnnnnnnnnnnnnnnnnnnnnnnnnnnnnnnnnnnnnnnnnnnnnnnnnnnnnnnnnnnnnnnnnnnnnnnnnnnnnnnnnnnnnnnnnnnnnnnnnnnnnnnnnnnnnnnnnnnnnnnnnnnnnnnnnnnnnnnnnnnnnnnnnnnnnnnnnnnnnnnnnnnnnnnnnnnnnnnnnnnnnnnnnnnnnnnnnnnnnnnnnnnnnnnnnnnnnnnnnnnnnnnnnnnnnnnnnnnnnnnnnnnnnnnnnnnnnnnnnnnnnnnnnnnnnnnnnnnnnnnnnnnnnnnnnnnnnnnnnnnnnnnnnnnnnnnnnnnnnnnnnnnnnnnnnnnnnnnnnnnnnnnnnnnnnnnnnnnnnnnnnnnnnnnnnnnnnnnnnnnnnnnnnnnnnnnnnnnnnnnnnnnnnnnnnnnnnnnnnnnnnnnnnnnnnnnnnnnnnnnnnnnnnnnnnnnnnnnnnnnnnnnnnnnnnnnnnnnnnnnnnnnnnnnnnnnnnnnnnnnnnnnnnnnnnnnnnnnnnnnnnnnnnnnnnnnnnnnnnnnnnnnnnnnnnnnnnnnnnnnnnnnnnnnnnnnnnnnnnnnnnnnnnnnnnnnnnnnnnnnnnnnnnnnnnnnnnnnnnnnnnnnnnnnnnnnnnnnnnnnnnnnnnnnnnnnnnnnnnnnnnnnnnnnnnnnnnnnnnnnnnnnnnnnnnnnnnnnnnnnnnnnnnnnnnnnnnnnnnnnnnnnnnnnnnnnnnnnnnnnnnnnnnnnnnnnnnnnnnnnnnnnnnnnnnnnnnnnnnnnnnnnnnnnnnnnnnnnnnnnnnnnnnnnnnnnnnnnnnnnnnnnnnnnnnnnnnnnnnnnnnnnnnnnnnnnnnnnnnnnnnnnnnnnnnnnnnnnnnnnnnnnnnnnnnnnnnnnnnnnnnnnnnnnnnnnnnnnnnnnnnnnnnnnnnnnnnnnnnnnnnnnnnnnnnnnnnnnnnnnnnnnnnnnnnnnnnnnnnnnnnnnnnnnnnnnnnnnnnnnnnnnnnnnnnnnnnnnnnnnnnnnnnnnnnnnnnnnnnnnnnnnnnnnnnnnnnnnnnnnnnnnnnnnnnnnnnnnnnnnnnnnnnnnnnnnnnnnnnnnnnnnnnnnnnnnnnnnnnnnnnnnnnnnnnnnnnnnnnnnnnnnnnnnnnnnnnnnnnnnnnnnnnnnnnnnnnnnnnnnnnnnnnnnnnnnnnnnnnnnnnnnnnnnnnnnnnnnnnnnnnnnnnnnnnnnnnnnnnnnnnnnnnnnnnnnnnnnnnnnnnnnnnnnnnnnnnnnnnnnnnnnnnnnnnnnnnnnnnnnnnnnnnnnnnnnnnnnnnnnnnnnnnnnnnnnnnnnnnnnnnnnnnnnnnnnnnnnnnnnnnnnnnnnnnnnnnnnnnnnnnnnnnnnnnnnnnnnnnnnnnnnnnnnnnnnnnnnnnnnnnnnnnnnnnnnnnnnnnnnnnnnnnnnnnnnnnnnnnnnnnnnnnnnnnnnnnnnnnnnnnnnnnnnnnnnnnnnnnnnnnnnnnnnnnnnnnnnnnnnnnnnnnnnnnnnnnnnnnnnnnnnnnnnnnnnnnnnnnnnnnnnnnnnnnnnnnnnnnnnnnnnnnnnnnnnnnnnnnnnnnnnnnnnnnnnnnnnnnnnnnnnnnnnnnnnnnnnnnnnnnnnnnnnnnnnnnnnnnnnnnnnnnnnnnnnnnnnnnnnnnnnnnnnnnnnnnnnnnnnnnnnnnnnnnnnnnnnnnnnnnnnnnnnnnnnnnnnnnnnnnnnnnnnnnnnnnnnnnnnnnnnnnnnnnnnnnnnnnnnnnnnnnnnnnnnnnnnnnnnnnnnnnnnnnnnnnnnnnnnnnnnnnnnnnnnnnnnnnnnnnnnnnnnnnnnnnnnnnnnnnnnnnnnnnnnnnnnnnnnnnnnnnnnnnnnnnnnnnnnnnnnnnnnnnnnnnnnnnnnnnnnnnnnnnnnnnnnnnnnnnnnnnnnnnnnnnnnnnnnnnnnnnnnnnnnnnnnnnnnnnnnnnnnnnnnnnnnnnnnnnnnnnnnnnnnnnnnnnnnnnnnnnnnnnnnnnnnnnnnnnnnnnnnnnnnnnnnnnnnnnnnnnnnnnnnnnnnnnnnnnnnnnnnnnnnnnnnnnnnnnnnnnnnnnnnnnnnnnnnnnnnnnnnnnnnnnnnnnnnnnnnnnnnnnnnnnnnnnnnnnnnnnnnnnnnnnnnnnnnnnnnnnnnnnnnnnnnnnnnnnnnnnnnnnnnnnnnnnnnnnnnnnnnnnnnnnnnnnnnnnnnnnnnnnnnnnnnnnnnnnnnnnnnnnnnnnnnnnnnnnnnnnnnnnnnnnnnnnnnnnnnnnnnnnnnnnnnnnnnnnnnnnnnnnnnnnnnnnnnnnnnnnnnnnnnnnnnnnnnnnnnnnnnnnnnnnnnnnnnnnnnnnnnnnnnnnnnnnnnnnnnnnnnnnnnnnnnnnnnnnnnnnnnnnnnnnnnnnnnnnnnnnnnnnnnnnnnnnnnnnnnnnnnnnnnnnnnnnnnnnnnnnnnnnnnnnnnnnnnnnnnnnnnnnnnnnnnnnnnnnnnnnnnnnnnnnnnnnnnnnnnnnnnnnnnnnnnnnnnnnnnnnnnnnnnnnnnnnnnnnnnnnnnnnnnnnnnnnnnnnnnnnnnnnnnnnnnnnnnnnnnnnnnnnnnnnnnnnnnnnnnnnnnnnnnnnnnnnnnnnnnnnnnnnnnnnnnnnnnnnnnnnnnnnnnnnnnnnnnnnnnnnnnnnnnnnnnnnnnnnnnnnnnnnnnnnnnnnnnnnnnnnnnnnnnnnnnnnnnnnnnnnnnnnnnnnnnnnnnnnnnnnnnnnnnnnnnnnnnnnnnnnnnnnnnnnnnnnnnnnnnnnnnnnnnnnnnnnnnnnnnnnnnnnnnnnnnnnnnnnnnnnnnnnnnnnnnnnnnnnnnnnnnnnnnnnnnnnnnnnnnnnnnnnnnnnnnnnnnnnnnnnnnnnnnnnnnnnnnnnnnnnnnnnnnnnnnnnnnnnnnnnnnnnnnnnnnnnnnnnnnnnnnnnnnnnnnnnnnnnnnnnnnnnnnnnnnnnnnnnnnnnnnnnnnnnnnnnnnnnnnnnnnnnnnnnnnnnnnnnnnnnnnnnnnnnnnnnnnnnnnnnnnnnnnnnnnnnnnnnnnnnnnnnnnnnnnnnnnnnnnnnnnnnnnnnnnnnnnnnnnnnnnnnnnnnnnnnnnnnnnnnnnnnnnnnnnnnnnnnnnnnnnnnnnnnnnnnnnnnnnnnnnnnnnnnnnnnnnnnnnnnnnnnnnnnnnnnnnnnnnnnnnnnnnnnnnnnnnnnnnnnnnnnnnnnnnnnnnnnnnnnnnnnnnnnnnnnnnnnnnnnnnnnnnnnnnnnnnnnnnnnnnnnnnnnnnnnnnnnnnnnnnnnnnnnnnnnnnnnnnnnnnnnnnnnnnnnnnnnnnnnnnnnnnnnnnnnnnnnnnnnnnnnnnnnnnnnnnnnnnnnnnnnnnnnnnnnnnnnnnnnnnnnnnnnnnnnnnnnnnnnnnnnnnnnnnnnnnnnnnnnnnnnnnnnnnnnnnnnnnnnnnnnnnnnnnnnnnnnnnnnnnnnnnnnnnnnnnnnnnnnnnnnnnnnnnnnnnnnnnnnnnnnnnnnnnnnnnnnnnnnnnnnnnnnnnnnnnnnnnnnnnnnnnnnnnnnnnnnnnnnnnnnnnnnnnnnnnnnnnnnnnnnnnnnnnnnnnnnnnnnnnnnnnnnnnnnnnnnnnnnnnnnnnnnnnnnnnnnnnnnnnnnnnnnnnnnnnnnnnnnnnnnnnnnnnnnnnnnnnnnnnnnnnnnnnnnnnnnnnnnnnnnnnnnnnnnnnnnnnnnnnnnnnnnnnnnnnnnnnnnnnnnnnnnnnnnnnnnnnnnnnnnnnnnnnnnnnnnnnnnnnnnnnnnnnnnnnnnnnnnnnnnnnnnnnnnnnnnnnnnnnnnnnnnnnnnnnnnnnnnnnnnnnnnnnnnnnnnnnnnnnnnnnnnnnnnnnnnnnnnnnnnnnnnnnnnnnnnnnnnnnnnnnnnnnnnnnnnnnnnnnnnnnnnnnnnnnnnnnnnnnnnnnnnnnnnnnnnnnnnnnnnnnnnnnnnnnnnnnnnnnnnnnnnnnnnnnnnnnnnnnnnnnnnnnnnnnnnnnnnnnnnnnnnnnnnnnnnnnnnnnnnnnnnnnnnnnnnnnnnnnnnnnnnnnnnnnnnnnnnnnnnnnnnnnnnnnnnnnnnnnnnnnnnnnnnnnnnnnnnnnnnnnnnnnnnnnnnnnnnnnnnnnnnnnnnnnnnnnnnnnnnnnnnnnnnnnnnnnnnnnnnnnnnnnnnnnnnnnnnnnnnnnnnnnnnnnnnnnnnnnnnnnnnnnnnnnnnnnnnnnnnnnnnnnnnnnnnnnnnnnnntcatttactttaaactctaaaaagtctttaatttctttctttattccttccgtgaccaaggtatcattgagaagagtgttgttcagtttccacgtgaatgttggctttccattatttatgttgttattgaagatcagccttagtccatggtggtctgataggatacatgggacaatttcaatatttttgtatctgttgaggcctgttttgtgaccaattatatggtcaattttggagaaggtcctgtgaggtgctgagaagcaggtatgtccttttgttttaggataaaatgttctgtagatatctgtcaggtccatttgtttcataacttctgttagtttcactgtgtccctgtttagtttctgtttccacgatctgtccattgatgaaagtggtgtgttgaagtctcccactattattgtgtgcggtgcaatgtgtgctttgagctttactaaagtgtctttaatgaatgtggctccccttgcatttggagcgtagatattcagaattgagagttcctcttggaggattttacctttgatgaatatgaagtgtccctccttgtcttttttgataactttgggttggaagtcgattttatccgatattataatagctactccagcttgtttcttcagaccatttgcttggaaaattgttttccagcctttcactctgaggtagtgtctgtctttttccctgagatgggtttcctgtaagcagcagaatgttgggtcctgtttgtgtagtcagtctgttagtctatgtctttttttgggggaattgagtccattgatattaagagatattaaggaaaagtaattgttgcttctttttatttttgttgttagagttggcattctgttcttgtggctgtcttctttttggtttgttgagggattactttcttgcttgttctagggcgtgatttccgtccttgtattgcttcttttctgttattatcctttgaagggctggattcgtggaaagataatgtgtgaatttcgttttgtcatggaatactttggtttctccatctatggtaattgagagtttggccgggtatattagcctgggctggcatttgtgttctcttagtgtctgtataacatctgtccaggctcttctggctttcatnnnnnnnnnnnnnnnnnnnnnnnnnnnnnnnnnnnnnnnnnnnnnnnnnnnnnnnnnnnnnnnnnnnnnnnnnnnnnnnnnnnnnnnnnnnnnnnnnnnnnnnnnnnnnnnnnnnnnnnnnnnnnnnnnnnnnnnnnnnnnnnnnnnnnnnnnnnnnnnnnnnnnnnnnnnnnnnnnnnnnnnnnnnnnnnnnnnnnnnnnnnnnnnnnnnnnnnnnnnnnnnnnnnnnnnnnnnnnnnnnnnnnnnnnnnnnnnnnnnnnnnnnnnnnnnnnnnnnnnnnnnnnnnnnnnnnnnnnnnnnnnnnnnnnnnnnnnnnnnnnnnnnnnnnnnnnnnnnnnnnnnnnnnnnnnnnnnnnnnnnnnnnnnnnnnnnnnnnnnnnnnnnnnnnnnnnnnnnnnnnnnnnnnnnnnnnnnnnnnnnnnnnnnnnnnnnnnnnnnnnnnnnnnnnnnnnnnnnnnnnnnnnnnnnnnnnnnnnnnnnnnnnnnnnnnnnnnnnnnnnnnnnnnnnnnnnnnnnnnnnnnnnnnnnnnnnnnnntttaggtctaatatggttttattcatttccatcacctgtttggatgtgttttcctggttttctataaggacttctgcctgtttggttgtgttttcctgcttttctttaagtacttgtaactctttagcagtgttctcctgtatttctttaagtgagttattaaagttcttcttgatgtcctctaccatcatcatgagatatgcttttaaatccaggtctagcttttcggttgtgttggggtgcccaggactaggtggcgtgggagtgctgcgttctgatgatggtgagtggtcttgatttctgttagtaggattcttacgtttgcctttcgccatctggtattctctggagctgtgcaggatacactcggtggggtcctggaaccaagatgtctgtgcagggtacactcggcagggtccgggaactaagatgtctgctgccaatgctcaggcaaagagctcctgtgctgggcaggtccctatcctctggccgggaaaatggtcacctgcctgtacaggatacactcggcgggatcccggaaccaagatgtctgctgctgatgctcaggcaaaatgctcccaagccgggcagatccctatcctctggccgggaaaatggccagctgtctgtgcaggatacactcggcggggtccaggaaccgagatgtctgctgctgatgctcaggcaaagcgctcccgcaccgggcagatcccaatcctcagaattcttaagatcgcatggctggtgttgtgggtatctggcggtagtcagccaactgtgcgccctagctaccccggtgctgctcggaccaaaaggggcttgtgcccctactcagaccgggtttttgcttccctgactaatgaagtctcaagtcgcgcgcgattggattcgagcagatgctgtgttccactcaccagaagtcttaagatcccttggcgggtgttgtgggtagctggcggtagtcagacgactgtgcgccctagctaccccggtgctgcttggaccggaaggggcttaatcttttttttcaatttttattagatattttcttcatttacatttcaaatgctatcccaaaagtcccctataccctccccctgccctgctcccctatccacccactcccacttcttggccctggcattcccccatactggggcatataaagtttgtaagaccaaggggcctctcttcccattgatggccaactaggccatcttctgctacgtatgcagctagagacataagctctgggggtactggttagttcatattgttgttccacctatagggttgcagatcccttcagctccttgggtactttctctagctcctccattggggccctgtgttccatccaatagatgacagtgagcatccacctctgtattttgccagagacaggcatagcctcacaagagagagctatatcagggtcctgtcagcaaagtctttctggcatatgcaatattgtctgggtttggtggttgtatatgggatggatccctgggtggggcagtctctggatggtctttccttcatcttagctccaaactttgtctctgtgactccttccaggggtattttgttctctgttctaaggaggagcaaagtatccacactttggtctttcttcttcttgagtttcatgtattttgcaaattgtatcttggatattctaagtttctgggctaataaccgcttgtcagtgagtacatatcaagtgacttcttttgtgattgggttacctcactcaggataacatcctccagatgcatccatttgcctaagaatttcatgaattcattggttttttgttattgtttttgtgtttgtttgtgtttttttagagagggtttctctgtgtagccctggctgtcctggaactcactctgtagaccaggctggcttcaaactcagaaatctccctgcctttgcctcccaagtgctgggattaaaggcgtgtgccaccatgcccagctgaattcattgtttttaattgctgtgtagtactccattgtgtaaatgtaccacattctctgtatccattcctctgttgaggggcatctgggttctttccagcttctggctattataaataaggctgctatgaacatagtggagcatttgtccttattacaagttggagcatcttctgggtatatgcccaggagtggtattgctggatcatctggtagtactatgtctaattttctgaggaaccgccagactgatttccagaatggttgtaccagcttgcaatcccaccaataatggaggagtgtccctctttctccatatcctcgacagccagcatgtgctgtcacctgaagttttgatcttagccattctgatgactggtgtgaggtggaatctcagggttgttttgatttgcatttccctgatgattaagggtcttaatgaagcccttaatcttataaaaattctctgacctctaaaatgttaaatttgaagtccccaaagtgactgaaaggagtagttagcacttgtttaggatacagtctatccttgctatgccattgcttccccatggctctttattggggggtggtgggggnnnnnnnnnnnnnnnnnnnnnnnnnnnnnnnnnnnnnnnnnnnnnnnnnnnnnnnnnnnnnnnnnnnnnnnnnnnnnnnnnnnnnnnnnnnnnnnnnnnnnnnnnnnnnnnnnnnnnnnnnnnnnnnnnnnnnnnnnnnnnnnnnnnnnnnnnnnnnnnnnnnnnnnnnnnnnnnnnnnnnnnnnnnnnnnnnnnnnnnnnnnnnnnnnnnnnnnnnnnnnnnnnnnnnnnnnnnnnnnnnnnnnnnnnnnnnnnnnnnnnnnnnnnnnnnnnnnnnnnnnnnnnnnnnnnnnnnnnnnnnnnnnnnnnnnnnnnnnnnnnnnnnnnnnnnnnnnnnnnnnnnnnnnnnnnnnnnnnnnnnnnnnctctgcaccttatctgtcccacagaagcatgtgacatgctgaccagcctttcctttccactcttgataaccccctatctgggctccaatttttccatcgccagctttcccactcagcatgtttgcagatccttcttgagtagctcaggctcgttcttcagacctcttgccacccatcttgtggctttcagagcagcctgtatcctacaacttagagttctgtcagttctcaggcctctccccttcacaccacacccatttatttaattctgatttgctatctccaccttgaaaataccctttccctttttcataaatgaaagctcatctctctgttgttcaagcccaaaaccttgagtatccttgtaaactctgctatccctctcaccctgaatgtctgctccatctacacatactcttgacctgactgaactgctactgagcctccagcatttgtcaccaaaagaatttgtagcagcctcttaactgcccatctgtaaccacaccccatcccttcagtctgtttcctgactctagtcaaaactctcttgttgcttgtcatgctactcactgaaagtcagagctcttacaagagcctaataaagccctgggtagtcaggaaccttattacttcctgactttaactgattttctctccagtgttcatactctatccatggaagttttcttcctgaatatatcagacacactgatgctgcagggcctttgtacttaactgctacacagaatgcttttctccatagaattcccaaatgactcactctcagaccccttgatcaagtgtttcctcaacagagagtcccttactgtaccaaataacatcccttccctcttgaccctgactatataaaatatgagtgtcttagtcacttttctattgctgtgaaagagacaccgtgaccaaggcaactctcaggaaagcatttaattggggcttgcttagtttcagaggtttaatccattatcatcatgtcaggaatcatggcaacacgcatggcacttaaggtaatagctgagaaatacatcctgatgccatccacggggagagagagggacagggagaggggagaggggggaaggaaaactgggcctagtatgggcttttaaagcctcaaagccctcccccagtgacattcctccaacaagatcacaactccttaataatccttgtaatcctttcgaatagctccactccctgctgaccaaaacctaaacatgagtttttgagggccatttccattcaaacgaccacaagtagcccctctgtaaccaacccagtggtgcccagcactcctgccacctttgctgtgctttctccactctgctctttagtgccctgtactgtgctctccctgcagaatgtctagacctgcctttgttttgtgttcgtcgcctgcacctggaacactgctggcacatgagtgtgacttatgtactggatgaatgaaagcttttttccttccagtgtcagtacactctcacaaattgctatccatctattagtgtttgacagtttttaaatttaggtgatattttgggctttttggcactgtgtttctgtctgttcccagttagtctttcatgtcattttctttctgtcttacctctcactgttacatcagtggctcttcttcctacacttgcaatagggacttctaggtggatcttccaaacccacttacccccttttctgtgacagaactttcattaatctctaaaagatctatggagctaggatatagctcagtggtagaatgtttgcctagagcgaacaaggccctgggttcaatcccaagaaacacagggttggtgaaattgatcctctatgttttcagtcagtagtgggtaggtttgtatcctacttacataagatatttaattcttatgagataaacatcatcacctccatattacagatataataacagcataaaggatttagcaggaagacaccaaacagatcttttctgatataatcagactgtcaatacatcatgctgcacatttatttaatttttttttttagtatctatgtctaagtgatttctgtgcataacttttctttggaaattatgaatagataatgcagaagtttcttccagataactttataagcaaattcatctagcagtaagcctaatgactaagagcctgcctctggaacaaaactgcagtcagatttagttttctatcatttaatgcagatttcacggaggattttagattaataacatgtctacaatgctctgcttttctagggaagtatcaaaaaatctaaaaaatctaaaaatatctggtctcttttttctcctttccttttaggttcgtgatgacgtgtaccagagcatcctcacaaataacctcccaaatcttctggagtacggcaacatcaccgctctgacaaacctgtggtattctggacaaattaccaattttgaatatttgactcatttaaacaagcatgcgggccggtccttcaatgatctcatgcagtacccggtgttccccttcatcctttctgactatgttagtgagactcttgacctcaatgatccatctatctacaggcaagtaaaagcgtcactctccctcctcctacctcctgcctttgtctctgattccctgcctccgtctctctgggacaaatgtgctgagaacttggtcttggggtccctgagctgatattttaccttacaggtactattggggtaatctcttaatttgaaatttgagaattaaaggaaaatggtttagcttttttccacctttcctgaacaaactgttgttttaaagaagccagatagtccaagttcattggcaaataattttatttagttaaaaaaaattctcttacttaaagaaaaattgacttcaaatattccacttgggaagtttttaagtattttaattataacttcctccaaatgagcctgacttggcccttaagaaatcaggttcaagttaattgacaatggtacattgtctatcttttagatattatattcactgctcttggacatttcaacattttacatattgctggcataaatatctgcaatgtttctggagagtagtttgacggtatatattcataaaaacctgttaactgtgcatacttgttttcagcaaactggcttccaggaattattcttgggaatgctaaagaacatatgttcaacataaaggttccaatttaaccagcagtcgttttatgagggctgggacctaaacttgcctacctctttgcttgctttggtatctggcactctatgcaaaagtttaacaggaatgtggtactcctggcattttttcaaagtatctaaagtttagaaacagcctgaaggcccagtattagatcataatacattgttgtatgcgaaaactactaaagcaatattgtagggctggtgagatgactcggcacatcagactggggatctgagtttgtcccttggaactcacatggtgcagagaaccaactcccatagcatgcatacccacacatacatgtacacaaaataagtaaatgtataagaatgtatggtagagccgggtgtggtggcgcgtgcctttaatcccagcactcgggaggcagaggcaggcagatttttgagttcgaggccagcctggtctacaaagtgagttccaggatagcctgagctatacagaaaaaccctgtctcgaaaaaacaaaagaatgtatggtagaaatacattttataagcatggaaagacattcttttgctttaaaaaaatgtataggtactcactaataagcagaaaaacagctggacaaatacattctaaaatattttacctgtgagttggtttattttgttcactccattgtaattcctttatttggcagtctgttagtctatctgaggcaaggactcactatataactctgatagtgtagggcttgctgtgtagatcaggcggaccctgaactcacagagagccgtctgcttccacctcccaagaactaagattgaaggcatgtgtcacaactggcaacaactgtaattcttaatattcagccataaaaatataattttatctaagaagatttattataacattcttgatttgttgttatttttcttggttttttttcccctggagctgaagactgaacccagggccttgtgcttgctaggcaagtgctctaccactgagctaaattcccaacctccttattataacattcttaaggagtgaaaaagtatgccagggtcttaaagataatttattcatattttaaaggtaaaaattgacatctattccataagacctttttactctttgatgaagtctctaagattgtactactgtcaccagaattttcatttaatgttactgaactccacaaccctaggaaatactaatttatcaaaaagacaaaaagctatatcatgaaggtatgggaatacattcttgtaatcccagcactgcagagactaagacaggaggattgttgccagcctgaactgcaaagtgagtgtaaggatatcttgggctacatagtaattaatgccctgtctaaggagaaaaaaaattacatctgaataagccagatgggttaggtttgctgagccttgagcagattttgctgttggttgaggtacagtgccagatattgacattatagatagttttttcactgtgtctcttagtcagagcaactggtccctcacatcaaaactatttatcctgcccttttacacctcatacagtaatgctgataggtttttaaagtgaagacatgtttcttggcctctaagaacatcatggggtattaatagtgggaactccattactaccatgttcatctgcgtgcacacctgcatgacagcatcacccagaagagtcagtgattcaccatacagacacaagtctttacttgcatttccttaacggtttatggggtcctgattttgaatggtgactgttggttgcaaagcaacattcttatatgagttaaggcctgcacattttcagtgtggagacatgagtagcttaatcctgatggtatcaaattacttcatattttctattatttcttcctttgtagaaacctatctaagcctatagctgtgcagtataaagaaaaagaagaccgttacgttgacacatacaaggtagttttagtttccattaatattttgatacatgaaaaatggagctttatgaacttacactttttaaatttgtagtatttatttttctgtcttttgtttccttgtactttaagaactgtaaattataaaattgaaaattgtttttctcttagttctttgaaaacgttccaagaatagaaagaaagtatactgttattttggcacaattaaaaaactaattagtccactattttgtcaaatggataaaaattatacttcttgtaaaaatcacagattttcagaggtaccaactatttatgtctctgagtgttatttatattatatggaaatagtggtgtcttttcattaatatgaccacatattttgttgggagataaaggtcattggtactgaagagacactagctcactcaagcatgtggctctggcaggccttgtccttctttcccattccctctgccttgctaaaaatccttagatgacattcctaaagcaagccaccaaggtctgtgccgttatttggccatttcctcttgtggctgactaccaaggtgtgtatatgtatgtatgtatgtatgtatgtatgtgtgtgtgtgtatatatatatatataatatgtatttatttctactataacactagacatattcagaaaaatatgcattttagatataagtgagatttcctattaaataaaaatgaattacccatatcaataatgttactattaatataattttattggaaacttggaaaactaacttaacatgtagtacattcttcataatagtgtaatgataggagtggcagaaacaattctctcatattcccacataacttatgtcccagttccagagatgtccctctaagtacctgaaactcaccatttgatttttctgcaattgaaaatatgacagcctatctttgtgagtttgaggctagcctgatctacactgagtttcaggattgccaaggctatacagaggaaaccctatcttaaaaaaacaaaaaggaagggagggagggagggaggaaggaaggaaggaaggaaggaaggaaggaaggaaggaaggaagggaaggaaggaaggaaggaaggaagaaaataaatatgacaatctaagagccaagacattactttaaaattcattacatccaactctgtcatcaggaagacaaagctgtagcagtgagcatagtgacaggaagtgtgtggttgagctgcctcctttgtgatgggcagagttggaggtgggaaagatcctcatttctttttaactctgtgtttgctctgcaaacctgtcacacaacatagtgttaatagtggtaatgtatgctaccttattacatttccatacctagagaagcactcaaagcatatcatgaaactgttcaatacagacgttttattgataagatcagctcttggttttgatatttggagctgttaactaggagtgagaatgcaaaacaggtgtgtccttatgacagggtagcagtggaggtagagagaactaggtggttctcatttggcctagggtcagtaggagactcctagatgttcaaaagggctggggatctggacactggtgggaagtcaagaataatgtcaaaagaggtggaggagaatggaagagaaaactagccatacatggagcacacaattgaaaatccctggttctgtgtcctgcagtacttggaggaggagtatcgcaagggagctcgagaggatgaccccatgcctcctgtgcaaccctaccactatggctcccactactccaacagcggcaccgtgctccacttcctggtcaggatgccgcctttcactaaaatgtttctagcctatcaaggtaaggatgtcttttgtaactaccccaaagtcatgctgtatcgttagaacaaaaaacctcgactagcttcttaaaaactagccctaaccaagcccaagaaaaggaattctacttaagtagttactaaaatactcctttaaaaaaatggtagtcaaatcttgctcctgtctaagattttagctttagatagtgtctacatttacaaaaatgcagttgagttttaaaaattaatatataattcacaaactataaaatttgccagttaaattatattcagctcatttaatattttgtgtagccctggctgtcctggaactctacctgcctctacaatctgggtgctaggattaaaagttgtgtgccaccatacccagctcaactctcttttaaaggcttgcgacccagtaattatttcaaagcataatggttttgtagcttgtgtaatttttttgtataaagatctgttatgggaaagtattagtctttataatactagttaatagagaacatgctagcctcattaatgcagtagagcttgcaagtgatgtagctcagcactttgcatgccagcttgaacatgactggggtaattcctgggtgtcagaagggcaaactcgctgcactatcctgtaagagctgaagtattagctttgtagttgtttctcgtgacctctgtttagggaaccattcagtttgtcctatcctgttttagacttctttagtcttttattcttaaagcaacctcttagaggaatgaatttatattcctgtgcttagtctataaacggggcttttagtttttgccccataagctcacagtaaagtcccacatggtggctgttcaactactgagacagagggagagtgttgtatgtgcatgggctactgtgagggtgtctgcagaagccagaggaggacagcgggtttgattactctgtaccctcttcttttcagaaagggtctctcactgaccctagagttagtctgacagccacaaagcccagggatacttctttctctctcctgaccccatagtgcagggtaacaagcacacaagtggccactcccggcttttccacatgggttctggggtccagactcaggtcctcagtgtttacactgtaagagctcctacccactgaaccatttctctagtttcctgagacagtcattatgtccctttcttccctctcactgtcacttcccttgaccaattgtacctagttaacttaatctcaggctgagagtatctgtatgtattgccccattccagctggtgcaaggaactcccataaacaaatgagtggctctgttaaggaagagcacccagaactgatagatacacacacacacacacacacacacacacacgctatccttgcttgctgtggtttctaaatataccattgtttgaagatctttttgggatgtaataacattcatttgggaatgtcatttcttaaaaatgaaagtgaaaacaatattttttccttttttttctttttctttgtaattcatttttttacactccatattccattccctgcccctcccctcccacccttcaactgctccacatcccacacctactccttaccacacatcgtctccacatggatacccccaccctccaccccatctggcctctaaactccctggggcctccagtctcgtgagggttaagtgcatcatctctgaatgaacacagacctggaagtcctctactgtatatgtgttaggggcctcatatcagctggtgtatgctgtctgtttgatggtccactgaaagatcttgggggtccagattaattaagactgctggtcctcctacagggttgcccttctcctcaaattctttcagtcttccataattcaacaacagaagtcagctgcttctgtccattggttgggtgcaaatatctgcacctgactctttcagctacttgttaggtcttttggagggttaggtcttttgataggcccctgtctgtaagcacaccatagcctcagtaatagtgtcaggccttgggtcctcccctggagctggatcccacttcgggactgtcactggaccttcttttcctcaggctcctctccatttccatccctgtaattctttcagacaggaacacttatgggtcagagatgtgactgtggagtggcaacccaatccctcacctgctgtcctgccttcctgctggggtgggctctatattccctctctctgctgtcaggcatttcatcagaggtccctccctgtgagttctgggagtctctcacctcccaggtctctggtgcattctggggggattccccccaacctcctatttcctgaggttgcctgtttccattctttctgcaggccctcagggcttcagtacttttccctcacccaataccagatcaggttccccccactccccatccacttgccctctcaagtccctccctccctccctccctccccatttatgattgctttcttctctctcccaagtgggactgaggcatccttgcttgggcacttcaactatggactgtatcttatatattgtgtatgggttattgttattgtttttgctaatatccacttattagtgagtatataccatgcatgtcattttgggtctgagttacctcactcaggatgatattttctagttccattcatttgcctgcaaaactcaagatgtccttgttcttaatagctgagtagtatcccattgaataaatgaactacattttctgtatccattcttctgttgtgtgacatctaggttgtttccagcttctggctatcacaaataaggccactatgaacagagtggaacacgtgcccctgtggcatggtggggcatcttttgagtatattcccaagagtggtacagctgggtcttcaggtagatctatttccaattttctaaggaacgtccagattgatttcagagtggttgtaccagcttgcaatcccaccagcaatggaggagtgttcctctttctccaaatcctctccagcttgtgttgtcacctgaggatttgatcttagccattctgactggtgtaaagtgtaatctcagggtcgttttgatttgcatttctctgattactaagtactttgaacatttctttagatgcttctaggccattcgagatccctctgttatgaattctcagtttagttctataccccattttttgattgtgttgtttggtgattaacttctttattatccctctatcggatgtggggttagtgacggtttttttcccaatctgtaggttgctgatttgtcttattgactatgccctttgctgtacagaagctttccagtttcatgaggtcccatttatcaattattgatcttagagaatgagccactggagttctgtttaggaaatttccccctgtgccaatgagttcaaggctctttcccactttctcttctgttagattcagcatatctggttttatgttgaggtccttgacccacttggacttgagctttgtacaaggtgacaaatgtgggtctattttcattcttctacatacagacagctagttagagcagctccatttaatgaagatgctttctttttccattctatatttttggtgcctttgtcaaaaataaagtgactgtattttgtgtttgtggttttatttctgggacttcaattctattccattgatcaacatgtctgtctttgtaccaataccatgcagtttttatcactattgctctgtagtaaagcttgaggtcaaggatggtgattcctgcagctgttctcttattgttaaaaattgtttttgctattctggtttttttgcctttccagatgaatttgagaattgctctttccatgtctttgaagaattgtgttaggattttgatgtggattgtattgaatctgtagattgcctttggtaggatggccatttttactatgttaatcctaccaatccatgagcatgggagatatctccattttctgagatcttctccgatttctttcttgagagacttgaagttattgtcatacaggtctttcacttgtttgattagagttaccccaagatattttacgctatttggagctattgtgaagggagttttttccctaatttctttctcagtctgtttatcctttatatacaggaaggctactgtttgatttgagttatttttatatccggccactttgctgaagttgtttatcagctggggaagttctctggtagaatttttgtggtcacttatatatcctatcatatcatctgcaaatagtgataccttcatttcttctttaccaatttgtatccccttgatctctttttgttgtcttactgttctagttaacacttcgaatactatattgaatagatatggggaaagtggacatccttgtccctgatttcagtgggattgcttcaagtatgtctccatttaatattggctgttggtttgcagtaaattgcttttattatatttgggtatgggccttgaatcctgatctctccaatacttttaacatgaaggggtgttgtattttgtcaaatgctttttcagcatctaagaagatgatcatgtgattttttttctttgagtttgtttatatagtggattacgttaatagatgtttgtatattaaaccaaccttgcatccctggggtgaagcctacttgattgtggtgaataatggttttgatgtgttcttggattgggtttgtaagaattttatttagtatttttgcattgatattcttaagggagattggtctgaagttctctgttttgggtgagttcttgtgtggtttaggtttcagagtaattgtggcttcatagaatgagttaggtagtgttccttctgtttctattttatggaatagtttgaggaaaattggtatcaagtcttctttgaaagtctgttagaattctgcactaactccatttggccctgggctttttttggtagggaggattttaatgacttctatttccttgtgtgataggggcctgtttagatagtttacctgcttttgatttaactttggtatgtggcatctgtctagaaaaccatccatttcatctagattttctacagttttgttgagcataggcttttataataggatctgataattttttgtatttcctccgtttctgttatgtctccctttttgtttctgatgttattaatttggatagttcctcttggccctttagttaagtttggctaggggtttatctatctatttgattctttcaagaaccagcttttggttttgctgattctttgtattgttttctttgtttcaatttggttaatttcagccctgagtttgactatttcctgccttctactctgcttaggtgagtttgcttctttttgttctagggctctcaggtgtgctgttaagttgttagtgttaagatctctcctgttttttttacaagggcagttagtgtactgctttcattgtgtcccataagtttgggtatgatgtgtcaacattttcattaaattccaggaagtcttttatttatttatttatttatttatttatttatttattccttgaccaagttatcactgagtaaagagttgttcagttttcaagtgtatgtgggctttctgtagtttttgctgttattgaagaccagccttaggccatagtgatcttataggatacatgggattatttcaatcttcttttatctgttgagggttgttttgtgaccaattatatggtcgattttggagaaggtatcatgaggtgctgagaagaagttgtattcttttattttagggtgaaatattctgtagatatctgttaagtccatctggttcataacgtctcttagtttcactgtgtctctgtttagtttctgtttcagtgacctgtccattggtgtgagtggggtgttgaaatctcccactattattgtatggggttcattgtgtgttttgagttttagtaaggtttcttttatgaatttgggtgctctttcatttgggggatagatgttcagaattgagagtttctcttagtggattttccccttgataaatatgaagtgtccttcatcatgcttgataacttttagttgaaagtctattttattggatattaggttagcaactcctgcttgtttacttagaccatttgcttggaagactttttttccatccttttactcagagatagtgcctctctttgttgttgaggtgtgtttcttgtatgcagcaaaatgctggatcttgtttgcatatccagtctgttagcttatttctttttataggtgagttgagtctattaatattgagagatattaaagagagatgactgttggttcttgatatgtttggttttgtaggtggttttatgtgcttgtggctctctgttttttactttgttgtgagatacttaatatcttgtcctttctttggtgcaggtatcttccctgtgttggatttttccttccaggaatctgtgtaaggctgggttggtagatagatactgtttgaatttggttttgtcctggaatattttgttttctccatctatgttgattgagagttttgctgggtatagtagcctgggctggcatttgtcttctcttagagtctgcatgaactctgaccaggctcttctggctttcatagtctctgttgagaagtctggtgtaattttgataggtctacctttgtatgttacttggccttttttccttgcagctttaatattctttctttgctctgtgtacttagtgttttgataattttgtgatgagaagattttcttttctggtcccatttattgatgtttcttatacctttatgtccatctctttctttaggttggggaagttttcttctatgattttgttgaaaacattttcaggtcctttgagctgggaatctcctctattctgattatccttagatttggtcttttcattgtgtcttgaatttcctgggtgttttgggttaggagtttttttatgttttgaattttctttgacagttgtgtcaatctcttctactgtatcttctacacctgagattctctcttctatttcttgtattctgttggtaatacttacatctgtaattcctgacctctttcctaggttttttatttccaggttttccttcatttgtgttttctttattgtttcttcttttatttcttggatcactttattcaactccttcacctgtttacccgtgttttcctgtatttctttcagtgagttattgatatcctccttaaaggactctattatcttcatgagatagaattttagggcatattcctgattttcaggtgtgttggtgtattcagggcttgctgtggtgagagaactgggttctgatgatgcccatgtattttggcttctgttgcttatggtcttgtgcttgcttttccccatctagatatccctggtgtttggtagtctgggtgactgtatagagtctgcctcttttttacttgggttgcttcaggtctcctggtaggcttgcagccctggttgtatcagaccacatgtggggccttctaactgggggctcttcacaggggcagaaaagctgcttatctgttaccttggctgcagtagatctcgtggtacaccttcagactgttgggtcttccatggaacagtcaagctgttgtccaactgctctgagtgcagctgatcctcaactgctctgagtgtagtgggtcctctagcgtgggttgggctatgaagtcttcatggaagcagaccaactatgggtctgccccagcagcaaggaccaggtggaagcgaaaacagaatattttaatgtagtttaaaacactgcagtgctattaatatccctccaactaaaaccacttcttccagtgtagcccaagaatgcatcaatatgaaattcccagtcaaccttcaatctttattttattgctgttaggagtagattcatatacaatattgccttttcttcatcaagtagttacactgttgttgttttgaaacccagtgtcctgtagcaaggtgggctttaaacttgtagtgtagctgagattggttttggattcctgacctccaactcccaagtgctgatattataagtgtgcactgccatgactatatcttcattgaatatttgtgaataggttaattttaaaccttaacattaccttaatcctcatttatttcaatttcattagttttatgctggcttttgattttttttcttaacctaatgagttagttcaagaattctaaaccttggcactattgttactttaagctatataactttttgtctaaagtgttgccctgtgtgttctagaacatttaacagcatctaccttatgatgccctgattttcttactttctggaaaaaaaaaaactatgaattttatttttcctcagatttaatttagcggtcagccaagtgctaactggctcagtatagtagatggaaaagtgataaaaataatggaaactgtagctcagcagagcaggtgagcttggagaaagagatgagctgattcttttgacattgctgtacttggtgctgagattagtctgtgacagtgtctacaccagaggacacgctcagactccagcaagtactttaggcaacacaacagagtccctcagaaccatacacacagctcctgttctcagcaatcgcctttgaatgtcacttaatattcccaacctgtgattgtgttcacagaaaagatatggggacaaaattcaattctttgtcattaatagtctataccaggaaagaaaatgaactgaagtgagtatactcagttttatactgctaaactttttagttaatgattgagtttagttaatggtattgctgcatctgaaaagccgtgtcagtattgcgtgttgtgtatgtggttaggagtaaaagggaactaagtaaggggagcaagtggcctgaagggaagtggaggagaaacaaatgaagacaataaatagcatgttgtctttcccatgcagaatctaatgtgttaacacacacacataaaacatgaaagccgaagacggcctatgtggaggcaaccatgagggtgggcagcagtggaaatgaggaaggaaaggtggagatgataggagaaacaaatacaagaaaattagagtgaaataatgcatgagagtataataatgaaacattattttgtacactaaaagtttcattattgaaagcagtggccctactctttagaaaaaacaaatatctaaatagtagatagtcttggtatctactattctccttttcgtcctgtctcttttcccttatgggtgtataggtatgggtgtccagctgcacgcaagaacgtgtctgcttgtgaaggctacagatcaccaacagatgtcctcaactgcttccccagtttatcttttgaaatgggatttttttactaaacctaggacacattctgtctgctcaactgcatggccactgagctcacacatagaccaccccactgctggggagacagacacacagctacccacctacctggcttttacatgcacgcttgggatcagacttttgtccttgtgctttggtaaaaggtactttgccacctaagccatctcctcaacccataattttctctctttaaattatacattcatttaataacaaggtcattattatgtgtccattatgtgctgggtatgagtggactcctgcttttgtgaaagtttcattctaactaagtagaaggcagtagtcatttaggcaagtagatgatagaaattctattagaggtatgatggaagcataatgcagttgaaaataatgtgatttcaaatatttgaataatcctttaaataaaccaaaggaccattacttttatcatttttgaagcaacaagtgctacgggaagcttcaagtggaatatggtctttgtgtctttattatattattggaatttctttgtagatcagagtttcgacattccagaccgaacatttcattctacaaacacaacttggcgcctctcctcctttgagtccatgactgatgtgaaggagctgattccagagtttttctatcttcctgagttcttagtgaaccgtgaaggtaaacagcagatcatttctcacatatttggaagggtatgcaatagagttataattttccaggagtaaaggtagcttttctaagacttgaaacctgatttctcagataggagagattcctgtcattaaatctataattttatttctaggtgagcttggggacttctaaaattttataggaccgaggactgggtacatataggaaactatgttttttaactattaaaattattttaatatgtattttaacttcattacacaatttttttctgtttgtaaaagttgcactcattaaaaagtaatagtaaaaagcaattcattgaaaaatgtaattaaaatcagaatgattttataaggaaataagagaaataaaacactctggggttagggctatggttaattggtgttgtgcttgcctaacatgtaccacatagaccaggtatggttgtgcatactgtaacctagagtatgggtggaaaaaagcaaagaagaaaaactctcttagtaaaattctctagtaatcaacgtcaaagggcattctagaggatagcctccaatgctgtagtagaccttggctaccctttcctgttccctgactgaaggtctcagacaactctgggaggggtacttttgagttgctttccttaatttcatgtgacccttgagaatatatgatgttgagatatatctttaggtaagtcagttttagacaaaacaccttagaatgtttgctatctttgggatatttggtgaattatcaatgcacttaatctgctagctgccctggagctgtttcatcatgttggctattcgaaatcacttcagtgcggctccaatggtgcacagtatgcagtactagtatgaaagtatacgtcagatatcagcacctgcagcttggggtgaacacatgtggatctcagtttagagctcatccacggtctgttttgtctgtagttcttcatgtgtattcctattatggctttatgacaagtcaccccaacacctagtgactcaaagcaacaataaatttgctattaattgcaagtccaagtcaaggaagtgtccttggttacattcagagcttgggctgatagggcaggggagtggtagatccactgctcctttccttaagttgatctgtgctttttcagaggtgttcttcagggaggttgatttgggcttcctcacaaactatttggctactcagggctccaaaggcaagtatcccaagagaaggggacagaagctaaagtaccttttctaacctagccttgccagccaaatggctgctcttgcttccctttgtctacccagattcaggctgagcacttccatactaccactcggtaatggagaaataagacacccagaaaagcgtagatagaaaagattgtagcctgttagttaaaggtaaataaaacaataacttttattattgttttatttatgggtatgggggttctgcctacatgtgtgtctgtaccacatgcatgcagtacatgcagaggccagaagagcattgaatctcccaggactggagttacagacaattgtgagcctccatgtgagtgctgagaattgaatctaggtcctctggaagagcagctagtgttttttgtttttgttgttgttgtagttgtttggttggttttggtttttcaagacagggtttctctgcatagtcttcgctgtcctggaattcactccgtagatcaggctgacctcaaactcagagatctacctgcctctacctcctgagtgctggaattaaaggcatgcaccaccaccagcagcagcttacaaccactgttcttaaccattgaaccatctttccagcccctgtagccgcttattaaaactgcaacttcctacaatgcttctcatgcctttccctgtcagcattcctcttggtaccctttcaccatctgctctgagtaatgagtaatctgcttggtacctgaaagcttggaatgattgagttcatggtccctcccttacacagagaaaccatctgaaaaacaaaacaaaacacagaaacaaaaccagaacctgtctagataatatgttattaattttgataggctaggaatacttagaagaaaggaagtcaaggcaaacctatatattgtccataaaaccaatatactatgacaactcattgtagcgtgatatctactttgtaagaggttttctaaactacagaatgttaatatgtattaaatatgtaatactcaatatatgaaaataccaaaaatctagaaattcttatacaaagctttaattttattttaatcaagtttataattaaagatgtttaagcactcagagtatttgaagagtttggtgagtagactactgaacttcatgggcacagatttcctgctttttctccctcctgttagaaagtgatcaaagggtaaagttgaaagtcccagcctgaattagcttagcatctgtcctgtccctattggtacagaaagaaggtgaacacctcattcttactgttggacatttcaccttgctgctgccattaagagttacattgcacagttaccagttttccagagctcttatactgtgggctaaatgaagcatgcatcggcagagtgaacacttgtgttgtcatcttccttaggctttgacttcggtgttcgtcagaatggagagcgggttaaccacgtcaatcttcctccctgggcacgcaacgatcctcggctgttcatccttattcaccggcaagcactagagtctgaccatgtgtcccagaacatctgtcactggatcgacttagtgtttggctacaagcaaaaggggaaggcgtctgttcaagccatcaatgtcttccaccctgctgtaagtgcctcttgtaagactgcacacacgtagaagttagaacctgaagattttagggttggctgttaagatgtttccttaaaatacccaagtcatcaaaagagacggttaaactaagctatactactattctgtaagattgtttaggttttgtatttcatctctttaaaagtgtcttagatgctatagctagggattctccgagaccacctcgtatctagtgatttactaaacaaatgtgtggactcagtttgcagctctgatttgtggcagtaaaggattccaagcataactgaacaaaggaaataaacagtgaacaatgtctgggtgaagcaaggcgcacacacctgactcctattaaagcacaaagagcatgctcttctgccaggagctttaatgacacatttcaagtggcctctgccaggagagctacctagagattctagacattcagattcagtctctcttagggaatgatcacttaaaaaccatctgcctgatgtgtgctaaaattctagacccagaaggagtgcaggtgctaagcatggaccacattgtttgcacagtataggcagagttcaacctaggaaaagttcaacccagaaatctcagcttccagacaccagccaaggaggcagcagagttctccaaagagagtggccagctggctgagttagttctttactgcctactattctgagtacagtttttgaaaagcagaatttttctttatgatagagacagtacaattgccttattagaaaatatgtaaaatacaactatcaaaaagaagaaatatgagaaataaactttgctttcagcatctagagataagtatcaaaaccacctgggagactttttctacacctgcatattattccagtaatttaatataaatcctgttttttaaatcttttcctcttgaataatacagtcttaagtatagtctgtaagaatagtagagtcataaggtgtcattttccatgattgcagtggccactgctatccctatttaagatagtctctaattccctagaagtagagttgttatttacacatgcattagtttatacttctgcatagactaggaagcatttactatgctaggctctctgagcatggaggtaacgagggtgagtagcataggaagaaggtgggttgggtagactgactgcatgtgttgggagagttccagtggaatgggtgaaaggacacatctgaaggaggcaaagaagcagagcacaaagaaaaaggtattctggattctgcatgctggctactcagtgcagaccaacagatcagctataatccactgcatgacatgtggttgccccagatttccacttagcaaggtgaattggtcgaccatgggcttgcttcattagtagtatctatgtagatgttacagatctgaaagtatttttaacaaatacagctatgtgtacaccccaaacccttacaaggaatcctgcctctgagcttgtttatagcagaaacacacacccaaacggtggcccagaaataaaattctctttgtagtctattgttctccataattatttttggatacctccaagtatccttagaagagagaatcaaacagttttatggtggctgtaatagaagacgactttgaagaggagaatacttttcattttgaggaaagcattatcatttgattcacagataagagttttgcaagagaagtagtaaatcgaggaggaaaaactaccatttccttctacccgtcttaggctccttgttggggctccacaacaaagcagagattaagaagagaacagtataaagacttacctagcacaaactttcatagcaccagagccttccctgggactggaaacccggagcaagtgcttagattgagattttatgctacagctgagggatgttacggagtctgtgaaatcacagcagatgaggcaagcaggtgaacggctcacatcgtctgcatgtgccttcgtcagtcttcagatacgaggctgctcctttcctccgtggaagaacatgtggtgctaccaacctgcctcagagcatggtcagaaagcttattctaggtttcatgaacagctgcagggaagagcgagtccttccttacattcgtcctgcagctcagagcgctccatctatgtaggcaccatgttttaagtagcatgttctgagcaccatcaagcatgaaataaaggcaaaggtctaggtataatttatgagctgcattcatattttatcctgagatataacatttagagcaattgtgaatttaaatattaacctcagtaaaccctgttctgtgcacataatttcacattatcttttcagtaattttgtttaaaatttatctagagagtgaaacatacaaggtaattcgtctagctggacttttttcactaaatctttgagacttttgtattttaaaatgtgcagtaaccttgaaggttatttaacttctgaagtgccttggaaattttattttgacacttaaaagaatgttgtatctagatacacatgtgaagattgctgtacctgattaaatgctaaaacctggaccatccacaagggcatgcacagcactaacaataatagcttagactagacagataagtgcacgggcacagagcaagcttctcagaggcacagtgccaggaaggaacatgccattgaaacaactcaccctggagccttccttgatgcttttccttattcactgtcagctgtcatgatgactcacttacctgcgtggcggtatatcttcacttttgcctttttccatgtactactttgggcaagcaacctacctgacatcttctatgacagtctcagactttaaatttgaaatgttttataaatacacctaattaatgtcagtcagacaaaacatattattttgttcacacttagaaatgttggttattactgtcttatactaataagactagtaaggctaagataacctcatcagaaacatttttaaatcatttgcattcaaaacagagtacccattacctaaagattgaaacaagttgttttcttttagcattgtgactaattctaccattacactgagtatgtcatgttcttggactgtcttctctacagacatattttggaatggatgtctctgcagttgaagatccagtgcagagacgggctttagaaaccatgataaaaacctacgggcagaccccacgtcagttgttccacacagcccatgccagccgacctggagccaagcttaacatcgaaggagagcttccagcagctgttggcttgttagtccagttcgctttcagagagacccgagaaccagtcaaggaagtcactcatccggtatgttactttgatttcagtaaaattcagcaaaggttgattgaactcctgccatgaccgggtagctgtggggatacagacatgaatagtgtggtcctagtgacaccagggtaagtaccagccagtgcaaaacaaataggggcagctagagcaatgacctgtgtgtacagtgagtgctggctgcatcagtgatatggagagcattccttgcaagtccagggaaaaggtgcattgattaggacagacagcagctgtcccccactgcacagaagggttattaccagggaaagcctcaccaagcaaacttctaaataggattgtgcaaacaaaaggggccagctggtaactatgtaagtggcacagctgggtctgatggccatcattaaccaaaaacactagcaagaggtacctccccagattatagaaatgggaaatattgtctctaaaaatagaaagtgagcataatttttctttacaattgaaaactaaagcaagcagaacttaaagggaaaaagaatcttagcttccacttaagttcaccatatgtagcatacaatactagaacttaaatttttgaatgttgcaaagtgtttatagaaaggagccactgaaaatgaaaagggaagggaagagaccttgaacatcaaccaagcagtatgcctcaagtgcactgaagtgctccagtcagtgaagagttttcacagaccttgttttgataatgtttttggtaaaaaaaaaaaaaaaagtgcttaaatatcttatgactatagatgcaaattcttcatacatataactcacatttgtgagttttgcattttaaatgcaaacagaacccatccaattaatagtcaacctaaagatatttattaatagtggtattatattaaaaccaagtcaccaatattgaattttgtagtggaaatctggatttttattttgtggctttaaagtcttattagccattaccagagttgctatttttaactataatacattttttaacatgtcagaacaacataataatatattcctgaaatttaataaattccatttaatttactactatacttattgcaattaatgagtgagatgttggttttatgggtttgtttgggtgattttggttttttgaaacagagtctcactgtgtagcccagagcagtttagagctgaagattcttgcttgctctggattgccttcttctcctagtgctagatgctatgctcagtgctatttagcagtttaaggatgatgtatgtaaaagcattaggcagtctgcctgctgacagtgagtcccagcctgcctcattcccactataggaccttcacattaactgtaccctccccacatagacccatttggctctctcatttcaataaggcctctgttcagagaacccctcctctgagagtcttccctgatgccatatataaatcagcatctccattgttctcagtcttctcacttttgctttataacactttcatgcctaatatacatttaggttcttgtttagtctgtctctcccatcctatctgaatgcaacagcattagaaagggtgttgtctgacttgcttattactgtgttcgcagttccacagaacatgcttggcacacagtgggcatccactattttactaaatgagtcactactcaggcagcttctttagagtttggcttgccctttcttctctgtgatgtacagtggtatttatgcctgttggggccagccccaatgggtcttctttcttggttagtggagggggaagactgtcagtgggggcaagatttggtcttgtgtgatatttagggcttgtgtttaataataaatcatttacctatctttgctaaggtaactgacctgcctgtctgaattcctctgagaccaaagactgcattagcacctcatcctaaaacagcagcagattaagtaaaggattaattgctagagccttttccctcttgtccagatgcctctgcttgtcagggtggaggaaggggagcaacaaacttctatcgaaccaggagaagagagtcatgctcacagaaggaaaaacttttacacaaccaaatatggataaactcacataaattcaaatacagattcatgcttacatgttcatatatatctattcaaaccagttgagcccagctacatacttatctcataattacacacttacacacatccatacttacatatgtatatggagtaaaagaccaagcatcagtgcagaaagaactcactcattctggatgaaaaacctgctccaatctttattacatagagaaagaaaaaagcttctgcccttttattactaagtgaatcaaacccaaatctttaagaagaaagctttgttctctttagtaagactaagcctgcctgctccttctactctctctacagcttcttgttttctcttccttctgcattatgcgtattgctttcttaattatttaagttgccttataatttctaagttattccactctgcattctccttctaatcttgctctctcctcctactctgatgtaataatgccttgctcccaatgccttactcccagtgcttttattcccagtgttatgttcccaatgtaatcttctctaggcttttgtacctgttctaggagaatagaccacatagctttaccaagtttcccatttttgcaaaagttcactagaaattcaaacataaattcaaatcataaattgaataagaagtttacaacagagaatgtttacatgcatatccattaagagtaattatctggctaaacattcattagctgccactgaaaactaaaaaccatatatttgtgactaagtttttagtgaagtttcacatagataatcccagtcaatattttatcttctgtccttgcacctatagtaaatctttagttctctttttatgacctttggttaatagttttacaacctcttgaaacgtgctctaagttacagattcctgcctgctatctcagaagcaattaactcataactctcaaagattggcagagttctcacttgcagttttatttatcagagaagacttaatagcagtcctattataaaagaacttaataattactaatataattttaggaattcttatcaaatcatcattaagaattaaaaaatatctgtctatatagcatcactacaagacagtacattttcattgttctgcagtgatctgttcaaaagggtagggtaatgcctagtgattgttttatagatttaataataacagcaaaagcatattaatagcaggaatctttcctaaaatctaaccttctcagcattggctagagaagcagatctatcattaactttaacagtccatggcagaaccgtctcaggaagatcacctgctagtttttagcttctccttgatggctcttggcatatgccacagcttttctttgcttgaaccacagtgggacctcccacacagtgcttaaccctggccttcaggtggcagctccaccatccctgacatacatcagctgtgctgtgctgaagaaggtcctcctcacagccagctgcacttacatgaacttcagtcagtttgtctgtctgagcagcacttagaaaaggcactctttttttttttggtttttcactgtatagccctggctgtcctggaactcactttgtagaccaggctggcctcgaattcagaaatccgcctgcctctgcctcccaactgctgggattaaaggcgttgggatagcattggaaatgtaaatgaggaaaatgcccaattaaaaaaaatgtttaaaaggcactcttcttttatgcatacagtataatgtaaaacacttagccatttttcagtggtcagtgattgtgtatacctcaaaaatggttagctttgtatataactcaaaaaaccctaaactctgtaattcatatgagagaaatttttaggcaaggaattatgaatgaccagtcataacttgagtccaacatcaggagatagataggctgacggctttcaaaaagaaacttgttttcagaatacctgtgttagcctctcttttcccacaggagcagtcctgctgctcagccttctctgacatgccacttaacactgcatattactgtgtcccctaagtggtctaaataagaagaaatagagcactgactgtcatgcattttaaacaatagtatgtacctgcttcttcattcagatggaaaaatgagataagcaaagtacagtgaaaagtatttgttgtttttatggaaacaactggaatttgttcagtatgttatcttcattagatttgtgtagcatttcctctgtaatttgaaaatagaaaactaaacttttaaatgtctaaaacagaggaagtctattaataagaagagattaagagtttaacgttcaaaaagatagtggaagaataaagttattgggggcaactctgagggctgttttctgcccttcctggattttcttcttgacagttgtttttacttggatggaggaagggttttgatgtctgttcatggcaggtgtgtggccaccctggctacagtcttctctccccattgcatgttcacagcctgctgctcctcagtcccatgtcctcctttgttctcactgggcaaccctgttttctctagggtttactagcagtctctggaccgctgagtgctctagccttctcagtacgctccattaataaactccgagcatccactgagaaactgctgtggtctagacatatatcaaacaagggtccctggttccaaagcttgtagctgagtgagatcttctgtgccatatgtcttcatttctgtcatatgtacagaatatctaagttggcttgtcaccaactttagatattttagcaagcctaaaagaaatgtctagttaaattttgttttctttgcttaaatttcaaatttgaattccattcaagctaagtcagaaccactcaacaaaaatcaaataagaagcaaatgtttctatatggtaaccatggagaagtaaaacacatagcagaattctctcagagtttatgatctaattatcttctgtttagaatttatagtgtaattaataacctcataaccttttatttataaggttttcttctttattctttaatttctttggttttagagccctttgtcatggataaaaggcttgaagtggggggagtacgtaggttcccccagtgctccagtacctgtggtctgcttcagccagccccatggagaaagatttggttccctgcaggcactgcccaccagagccatctgtggtttatcacgaaacttctgtcttctgatgacctacaacaaggagcaaggtaatgtgaaccacagtgaggatcagacaggaggtctcttagaagatctaactgtcaccagctcacctggactgctgccttatttgacttctgaagttgcacaggctttggagaaaagctctcttcagaattgtggttacttatgcaagctaggcattaaagtgtagtacattaaaaagtgagaattaaatgcagtagtgccatttaaaatgagggagttgagaacaaatgcctgtgcttccaggatgacagcattgtcagtctgatggaaacatacacattctaactctcaatccccaagatgggcagatgcacttagcagacagatctggtgctccagaggatgcacctgtgcgttaaacatgcccagggagtgataagtataaacacatgtcctaaaggcagctctctggttccctgctccagctcagcagccatgcagtgtggagaaggactatgtggtatggatcacttcatatttcaaatgtcacccagacactggagaactgaggacattttccacttatcagtccctctgtccttcctgctaacattttctagtgtggaggctctcctgcttggcctaaggtgaaaaggaatggctgaggatgctcctgttcatgtgaggttgcttttaagcttcctcagtcagcacccttatcacgcagcactataggatttaaatgtgtctcatacaattctcaacctattgcattttatcactaagtctcaggcccttaatgtaccttgagagccatgttccttctgtaacttgtcagtagagtgggcttgggctaatcagtctaggtgtgtgtacagaagtacttacactgtaactaggtgtgtgtacagaagtacttacactgtaatctaggtgtgtgtgcagaagtacttacactgtaatctaggtgtgtgtacagaagtacttacactgtaatctaggtgtgtgtacagaagtacttacactgtaatctaggtgtgtgtacagaagtacttacactgtaatctaggtgtgtgtacagaagtacttacactgtaatcctggtgtgtgtgcagaagtacttacactgtaatctaggtgtgtgtacagaagtacttacactgtaatctaggtgtgtgtacagaagtacttacactgtaatctaggtgtgtgtacagaagcacttacactgtaatctaggtgtttgtacagaagtgcttacactgtaatctaggtgtgattgcagaagtacttacactgtaatcctggtgtgtgtgcagaagtacttacactgtaatctaggtgtgtgtacagaagtacttacactgtaatctaggtgtgtgtgcagaagtacttacactgtaatctaggtgtgattgcagaagtacttacactgtaatctaggtatgattgcagaagtacttacactgtaatctaggtgtgtgtgcagaagcacttacactgtaatctaggtgtgtgtgcagaagtacttacactgtaatctaggtgtgtgtgcagaagcacttacactgtaatctaggtatgattgcagaagtacttacactgtaatctaggtgtgtgtgcagaagtgcttacactgtaatctaggtgtgtgtgcagaagtacttacactgtaatctaggtgtgtgtgcagaagtacttacactgtaatctaggtgtgattgcagaagtacttacactgtaatataggtgtgattgcagaagtacttacactgtaatctaggtgtgtgtgcagaagcacttacactgtaatctaggtgtgtgtgcagaagtacttacactgtaatctaggtatgattgcagaagtacttacactgtaatctaggtgtttgtgcagaagtactcacactgtaatctaggtgtgattgcagaagtacttacactgtaatctaggtgtgattgcagaagtacttacactgtaatcctggtgtgtgtgcagaagtacctacactataatctaggtgtgtgattgcagaagtacttacactgtaatctaggtgtgattgcagaagtacttacactgtaatctaggtgtgattccagaagtacttacactgtaatctaggtgtgtgattgcagaagtacttacactgtaatctaggtgtgattgcagaagtacttacactgtaatctaggtgtgtgtgcagaagtacttacactgtaatctaggtgtgtgtgcagaagtacctacactgtaatctaggtgtgtgtacagaagaatttacactgtaatctaggtgtgtgtacagaagtgcttacactgtaatctaggtgtgtgtgcagaagtgcttacactgtaatctaggtgtgtgtgcagaagtacttaacactgtaatctaggtgtgtgtgcagaagtacttaatactgtaatctaggtgtatgtgcagaagtacttatactgtaatctaggtgtgattgcagaagtacttacactgtaatnnnnnnnnnnnnnnnnnnnntacactgtaatcctggtgtgtgtgcagaagtacctacactataatctaggtgtgattgcagaagtacttacactgtaatctaggtgtgattgcagaagtacttacactgtaatctaggtgtgattgcagaagtacttacactgtaatctaggtgtgtgattgcagaagtacttacactgtaatctaggtgtgattgcagaagtacttacactgtaatctaggtgtgtgtgcagaagtacttacactgtaatctaggtgtgtgtgcagaagcacttacactgtaatctaggtgtgtgtgcagaagtacttaacactgtaatctaggtgtgtgtgcagaagtacttatactgtaatctaggtgtatgtgcagaagtacttatactgtaatctatgtgtgtgtgcagaagtacctacactgtaatctaggtgtgattgcagaagtacttacactgtaatctaggtgtgattgcagaagtacttacactgtaatctaggtgtgattgcagaagtacttacactgtaatctaggtgtgattgcagaagtacttacactgtaatctaggtgtgattgcagaagtacttacactgtaatctaggtgtgtgtgcagaagcacttacactgtaatctaggtgtgtgtgcagaagtacttacactgtaatcctggtgtgtgtgcagaagtacttacactgtaatctatgtgtgtgttcagaagtacctacactgtaatctaggtgtgattgcagaagtacttacactgtaatctaggtgtgattgcagaagtacttacactgtaatcctggtgtgtgtgcagaagtacctacactataatctaggtgtgattgcagaagtacttacattgtaatctaggtgtgattgcagaagtacttacactgtaatctaggtgtgattccagaagtacttacactgtaatctaggtgtgtgattgcagaagtacttacactgtaatctaggtgtgattgcagaagtacttacactgtaatctaggtgtgtgtgcagaagtacttacactgtaatctaggtgtgtgtgcagaagtacctacactgtaatctaggtgnnnnnnnnnnnnnnnnnnnnctaggtgtgattgcagaaagtacttacactgtaatctaggtgtgtgtgcagaagtacttacactgtaatctaggtgtgtgtgcagaagtacctacactgtaatctaggtgtgtgtacagaagaacttacactgtaatctaggtgtgtgtacagaagtgcttacactgtaatctaggtgtgtgtgcagaagtgcttacactgtaatctaggtgtgtgtgcagaagcacttacactgtaatctaggtgtgtgtgcagaagtacttaacactgtaatctaggtgtgtgtgcagaagtacttatactgtaatctaggtgtgattgcagaagtacttacactgtaatctaggtgtgattgcagaagtacttacactgtaatcctggtgtgtgtgcagaagtacttacactataatctaggtgtgattgcagaagtacttacactgtaatctaggtgtgattgcagaagtacttacactgtaatctaggtgtgtgtgcagaagcacttacactgtaatctaggtgtgattccagaagtacttacactgtaatctaggtgtgtgattgcagaagtacttacactgtaatctaggtgtgattgcagaagtacttacactgtaatctaggtgtgtgtgcagaagtacttacactgtaatctaggtgtgtgtgcagaagtacctacactgtaatctaggtgtgtgtacagaagaatttacactgtaatctaggtgtgtgtacagaagtgcttacactgtaatctaggtgtgtgtgcagaagcacttacactgtaatctaggtgtgtgtgcagaagtacttaacactgtaatctaggtgtgtgtgcagaagtacttatactgtaatctaggtgtatgtgcagaagtacttatactgtaatctatgtgtgtgtgcagaagtacctacactgtaatctaggtgtgattgcagaagtacttacactgtaatctaggtgtgattgcagaagtacttacactgtaatcctggtgtgtgtgcagaagtacctacactataatctaggtgtgattgcagaagtacttacactataatctaggtgtgtgtgcagaagtacttacactgtaacctctagaagcacagctcctgacttgtatccaagccccactagttactatgtgtgtggccttgagaacgttacttgaggccttctagatactggttttgatccattaaaaaataggaataccaaatgacttccctcccagcgtgatttattgtgaagactcaaaatagtgtatgaaaatgattagcatcaggcctggatcattataagtattaatactcacaagaatctattagactttaaccatcctgggccaagtattgtcattgttcactgctttgacctaaaccataataggaagcaccacagaaaccaggcagtggtggcgcacacctttgatcccagcatttggaaggcagaggcaggtggatttctgagttcaaggccagcctggtctacaaagtgagttccaagacagccaggggtctacaccgagaaaccctgtctcgaaaaaacaaaacaaacaacaaaaacaaacaaacaaaaaagacaccggaagtgccacagaagcttcacagagagcaatgattgacagctgactacaccttgcagatgagtgttgagtcctgattgcaattggatgtgttgagtgctaatatgtaaatagcatggctctgagtggttatctgtcataatagaaagctgcacaaggtatgcataatcatcataagaccagtagtccatttccttgggaactgtgcctcagactgcctgaaggttttcctaccaagtatactttgttctattcatggcaccttatgaatctctagagctaaactgtaattttctcacaagctccttcttaagatccactgttcattagataaagtttctttctctaaaacaacaaatgaaaataagtccaattaattgatcttcaaccacattgatctttagttctgaattaagtaagtcccaggcagaacacccccagtgaaaaagaaggtataaccactcgtaggtcctgtgtatcagcttgatacctgagcgttctcatactcatgacatcatatgagtatgtagtggggcttgtactttgtgagcatattctcggttcttttgttgtaaaactgatgtccacatttgactgtttaaaaaaaaaaaaaaaacaccaaacttctgaattgtattttcagtgcgctgctaattcatctaagaactatttatttgtttatccacatgttgtgtgtcttcttactgtacttactgtaattgcacatgtgtagacaacagaaagtcccaagaaagaacacagaatgttcaagtctttatgccaataatggcataatacggtgctgttaaagacagagaaaataccaaaatcctcttgagagacagtctgcagtgccaaatcctacagctaaccagagtggatctattgcttaggaagggatggcttctcccagcagagtttacttccagtgttcaaagttgttcatactgactactcagcactagatatcaagaacgttacttaacaagtatttaggtcatgtttcacttttaaagaaaaagaatctcagagcacgaatagagtaagctttattattgttgttgtctttataaaattttatctgagaagataattccacccttaggactaaaactaagattattttatctcagacagataaggacatagtgcctgaaaagagtgtatattctgctttataaatgtcagcctttaccttgctcttgtctgaggtgttatatgatactatactgacaactagatccttggttttcccttctgttgaggtgtgagaagcatgaacaacaccaatattcagtggtctgctatcctaagctggggatatgctgacaacatcttacggttgaaaagtaagcagagtgagccaccaatcaacttcattcagagttcacagcagcaccaggtaagcttaggtataaggactgtatgctgatgaagttccatgtcttgcgaaggaaggaaggaaggaaggaatctagctaacactggtctacttaaatgtcagcccagaagctgctgtttgcagagcttctaggtgtcataatccctgctcatctgattaggtcccacggtttgatttttgcctacttcctcattgggagagcttgcctggggcctcgtgtttcagcaaatgagctgctttcatcctggctccatttggctttgcaactaggtcattttctgtaaccatagtatcatctttgttatctggtttttcctaaataaccgaacatctaatgaagcaagaagacactgagcctcatatcctggagctgtgttgagttaccaggagctagatagtcacttactttgacagataacttggcctctctaaactagagttgtctttccacctctttaaaaccgtgtttatccagtttatgttgatgcctaaaaaagctgctataaacatgttgctgatgtttataaagtttgtgtgctatgcatatccaatagacacatagtactgctgcagccatctaaggctctggattgaacacacaaccaccttcagtctctgtccaccgtttcatggggagctttctgaccgttgtctgagttctcttcccttgcctgtaaaatacccactacctgttcatgtttgctggcatgttcccaccctggaatcctagaagctgggtaactaccccaggaatggctggcagcaaaagcaacaacggccatgccatgttttctaagtcatttgttactaggcttgtgcagaggataaagggactgggaaaagcaatcttattacaaacactgataagatttttgtttgtttgttttgaatcatattggggcattttatgcaaatagaaatatgtatccaatataagcaggtgatgatgaatcataagagagctggtagtgtaattaaattacaaatgagtctgcaaaaccagtgaaaacacaaaagcatattccaaaataagtgtgttcctcgctgccttctttatggaattgtcatgaattacaaggggaaagaacacagagtgggagttagatgtgtaaaatatcctccctctgcaaatctggtgacaatcatagtcatgactgggataggtcagttctttggatgtagtgcatggcatcaactactgtcaagtagaggctgtgaggccacgtggagaactgagccaagcttgaatggtacttccatgcataagaataaagaattttttagcaagagtaatccttcacctttatcttcccttctcctatttaacaacatttacaactgttaacgtgatacctattttttacatacacactgcttccctacagagaaacagaaagagaatgcacataagtaaaaactagtagcccagcttggtggcttctaacacttaagaggcttagacttgagaaccttcagttcctagacaacccgggatacatatttagaccctatttcagaacagaagaccagtacattaatgtttgaacccctcacacattgatactcaagctttgatcgatcctgtattattttgttaaatttctaagtcacaagtgtgtataaaaataaaattgtgaggcagacagacacacatacatatactaggagcccacagtgaatggctggtgacaagtggaagagggattgcagggataatctagctcaaatgaaattaaaagtcaataaataaataactgaaaaaatgtataacattgtacactgttgtttttaaaaccttgtaatctggaaacaattattaaagatttttgctctaaactgttgaaagtactatggctatatatgcttctgctctgatcatatcaaggaaaatgtttacctggaagcttgtctttgatttgtcctttcaaaggtaaccagttgtgcctgggtgcctgacagttgtcagctcttcactgggagcaagtgtggtgtcatcacagcctataccaacaggctcaccagcagcacggtaggtcctggctcactggcacatgataggacttttatgtcattgagaaaagccaagatgatgtgaggtatccttgcttaaggctaacttaaaacatgtgttagtccttcccttttctagctcctagaaaatggaaggtcatgttcctaactcattagatttaggtttactaagagtgatgaagaattttgaaaataaataaataaatacataaataaaataatcataaaggtcctatttttgcttcagagacagataatattttgatttattatctgctttgcatttgggctttttcatgctgcacatgtggagctcagaggacattatttaggattctttccttcagtcagtcatgtgtgggttctggggactgaattcagatcatccagtacccaggccaggcatggcatcaagtacctttacctgctgaactcaaaaggaagctcaactcaggttcaccttccacacacacagatgttcttggctacctcttgagtggagcccagcagtgggtgcagacaggggacttaccttctacaagatgttccatgcaggggcagaagggacacttaggagccatcctgggatcctagaactccttactcaagagggggtgagccagccccaatttctgtaccagactacagcatgggaaaatctaaaatgctaatgagagtaaacacaccaataaaaaagcaggtcacagtcatgtgaccttcagacatagttggctttagaaagtccatctgtagtctttgagaagtagcacagtattggtacttgtcaaactgaggagaggaacaaacattttatggcactatatataacttgaaaaacgttttaaatatcagcaaagggtcaactatgataattgtttggagtgtcatataccattaacaccatttaaagataatatcaaaagtagaaaatgcaaaatacaaaatagaaatgtatttgtatagcaatactgcaaacaataaaaatgtatgtgcctttgaacaaagactgaacaagaacaaatacaaataaaaagaaatacaagttattaaaaactgagcagtttaaattattataatcctttattaacttaagattttaaaaagttaaataggattgaaaaatgaccagacaagaatgctgagacacagttgtttttcattttgagaaactgcagattaccttgtaagggcttttatcttataccttgcttaatattcaaattccagccctcagaaattgaaatggagagtcagatgcatctctatggacacacagaggagatcaccggcttatgtgtctgcaagccgtacagcgtgatgataagcgtgagcagagacgggacctgcatagtatgggacctgaacaggtaccaacaactcttatccagacgtgttccttgaaatattacatattttacagtatataagaaagacactaaaatcatgtcattattttatcaatttagacatgaaacacatacttaaagtagtaagagtagttctgtagtctttttaaagtcagaagtcaaataccttagaagaagagttatacgtattgaggataggaaacaaaagactctaatcctctgtatgactggatatgcaaattcatgtcttttttttaggctgtgctatgtacaaagtttggctggacacaaaagccctgtgacggctgtctctgccagtgaaacgtcaggtgacattgctactgtgtgtgactcaggtgagctgctcccagcttaagtctagggttgtccatttcctgactcaagctggctagatcttttctcagcccccatcaatgtaagccctttggccatggcatagatgtatattaaaatgtaaggtcctaaactgacttcttaccttaggcaagagttaaaattgttgttttcctaagagatgtaaaaatttatttgagaacacttaaattactgttacctaattatctgaaagtccttttgttttctatactgctttgctttttgtattaaactattggctacgttacctttcttgtgctagaaaacaagtttttgacaagttgaatttgttgatgttactttccttttggtgtaataagatactctgaaaaaggcaacttaaaggagtctgtttgtccatgttcggacagtgtacagtgcatcatggtgaggatgtcatggcagtaggtcacattgtgttcataatcaagaagcagagagcaatgaatgctgatgcttggctctctttgtcctttttatataccaggatttcagcccagggaatggtgtcacccacagtgggcagagctttccatctcaattagctcaatcaagacattgttgcaaaggcatgcctagcagtctaccttctaggtgattctagctttcaagttgacatttgtgattaaactgtcacagatttgataggcttttagtaatagatcatgaattggcaggcacccatctgagatagaaaggcattcctaagccaaacaggggaagtgggctatgcagggagaaaataatgaagaaagaagagggacaccagccattggccagtgttgagtacgtctctagtccctgagagagagaactaggtattcagtggaggtatgatttgcttaggttccaggagaaagatacatcttctagttaaaggtcacaatggttttcccatatttctatgtttaaaatatgatgcatctgcaactgttgaactcttgaattttctgtttgtatttctgtttgtaaggatcttaaaattgaaagagtctcttgaaaactatttgcttttttaacatccatttaatatggagtacctttttatataccatttaatatagagcacctttgatacatctctagtgggtaagcctctgttttctgcttggctccatttttctattatttgggttttttaattttatttttatttcattttattttatattttatttttaaatgttatttaattaattaattttatttattaattttgaaaattaggtaacactatatagcacagactggccttgaagttctgttcatagagcatttctccttgagaatgttcaacctagacttgctatctcaatccagaataaagatagaagtgagcagccaaatgaagaactaaagaggagctggcctaaaaggaccctgagcataggactgtcttcctgggcttgagactagacttgggatgtgcagggctatgtgctcgagctcagaagtaatcaagtcaggcagggcttctttgaaggctcgtataggctggtggcagtgtaatctctgttctctctttttccacagaaagcagaatctgacaattctaaccctctaattcttactccaaagccaggagcccagccaggagcccaggcctgagtgttgagaagacagggcttcccagggcttgggagctttttaatgggtccagagacagtgactaaatgctcaaatcataggtgtctcgtggggttttgttgctgtttttattggacactgattgattgttttgttattatttatttctctacatatcccaagctagcctcaaaatcatagcaatcccctaccctagcctcccaagtgctgggaatataggtatgccccagcatggccagctattcattcatttttgtagtcaagcaaagtcatggcctcactgatgttatagattttggatatgaaagtgtttctgtcttagcctcagtcataaaataacgccatgaaaacatccttatctcctcctgaccactgctaagggtccagtctctgctgtgcaagggagtagatgactgacagccttgctgatagttctgccctggcctcctcctcactagcagctttccttgactgggttgcatactgagagacactgggggataaaagaatggttatttatttaaaaaacaaaaaacaaaaaaaacctctcagctttcttactttgaccccatttgaaagctagggctgatcccaagagagctcagtttggcagagttaattactagatgagctagtggtgggatattctgggatccctggatagtgagcagcataacagaactgcatagaaatttttctaacctgaacaaaatgccttctcaatgtttttaaggcctcttgagaaatgtataaaaggactcatgaaaaagcattagatatagctaatgtaattttaaaaatactttttaagacaaaccacacttgtggacaatgaactattctggtctcctatttgcttttagcactcaaatggaactaagtcataaaatgcagcctacaaagtcttgacctttcagaggatacatctaagcagacttgaaccaaaattttcaattcttccattcttattatgggatgtgatttgtataatgataagactgaagttaaattatgaaaatactgtagtcagtttcttctgtctaaccattctatctctggatcagaatgcctgtctttgggggatgctggatgtgcatggcctggccctctatagactggcattgtgaagttggagcagtgttctaagactcagggccagctggttctccaacttttgatttccaagactgtggataagaacagagatggccaaccttgcaactttcagataatgtgttaagttttgcatgaaagcaatctggtatggaataatggtctctcactttactgtatacagttttttaaactgtatgttttaaacagataggtttggttttaggttgtctcaaaatgccaggtaagctgccttgactaataaattacataccacacttaagggcatcaggtccaggtttagacttttcattttgaagggttaagccatgagatagctatggaccatgatcaaagaggtgattctcagggctagagagatgattcaggggttaagagtgtgaaccccttttgtaaaggacccaggtttggttcccattatctatgtcaggtgtaaccccaattccaggggatctgtgcctctgacctccataggcactgtgttcagatgtacacacccacatagaatttaatttttttaaatgtgtctttcttttagaagatggatctctttttacttactgattcctgcatctcccaaaccatgttttacaattagaagtcacaatggcactgaggaaatggcaagagtctagtgcatagcatagaggctacctagaagcctttcctgagtatgcaccccagtgcctcagttacatcaccagtatttcagaaactttcccactgacctcaaaataaagtttgttctggtcactaagcactatgtccccattcctcgcccgcctcactggaccaccactggccacctgcttccttacttccacctctatgactacctgttctagatctttttgttattttttctttattttttaattgaaaatatatgttctcacctagtatattctgattatggcttcctccccacaacccaatcccaccccctttcttgtcctaactcattagaaaacacaggcatctaaaagaaaaactaaaataacaataatttaaataaataacagaataaatgcaaacaaacctgggtaggaagtaagaaaagaaggaagggagggagggagagagagagagacagagagagagacagagagagagacagagagagagacagagagagagagaacgagcgagccaaagaaaaagcacaagaaacatatataagtgtagagatacattggcaaacacagaagtcccataaatacaaaattggaaaccatatgcaaaagatctgtagggtaaaaaaagaagaaaagaaatgcccaaacaaagcattatgagataaaaccaaccaaccaaacctccaaaaatatcactgggcttgttttctattggtaattttcttctggagtggtttgtatgtccagtaagactccactggagaaaactgacttttttcacttgtgagtgattatcaattggagataatttctgggataaggctttaggctcatttccacttccactgtcagacctggaccccatcaggcccagcctgtgcatgttgctgcagtctctgagctcgtatgtgtttagaaagcgagtttccttgctgtcctctgcccactctggctcttaaaatccttctttttttttcttaaatgttttattatgtaaatgcattttatacataaaatatattaataatattgagtattttgagaatcaaataatacataaaaatgtgttaacttttatattcatatccctccatacccgtaccctaaaaatatcattaatgaacattcaatattatccataactgaggatcctatatctaatgttgaatactaaattgtttcaaaacatgcaaaatattctttgggaattaagcttagtaaaagagcataaaatactaaaaatgaatcaagaaatacattcaaaagcccttgtatgataccacctgacctagtgaaagagtatttaaaacgcattatatatctgtgtacattgtctaactataagtttacttttaaaagattatcagtgtttctaggagagaaattattttatcaataagtttattttaaaaatttcaaaatagcaaaaactctttgaacttaaacattaagaaaatgatgatttcaggcacagtgaggaaaaattatcaataatgtttccatgatgtttgtagaacatgactttaatattttcagctgttaatattcaacaaacaaaattattttgagatatatttcattgttaggtctcccttttcatttctgattttattaatttggatactctctctgtgccctctggttagtctggctaagggattatctatcttgttgattttctcaaaccaccagctcctggtttggttgattctttgaatagttctttttgtttccacttggttgatttcagccctgagtttgattatttcctgctgtctactcctcttgggtgaatttgcttccttttgttctagagctttcaggtgtgctgttaagctgctagtgtaagctctctccagtttctttttggaggcacttagagctatgagttttcctcttatcgctgctttcattgtatcccataagttttggcatgatgtgtcttcattttcatttatctctaaaaagactttaattttttctttatttcttccttgaccaaattatcattgagtagagcgttgttcaacttccatgtgtatgtgtgctttccgttgtttttgttggtatttaagatcagccttagtctgtggtgatctgatacagtgcatgggattatttcaatctcttgtatctgttgaggcctgttttgtgaccattttggagaaggtaccatgaggtcctgagaagaaggtctgttcttttgctttgggatgaaatgttctagaaatacctgttagatccatttgattcataacttctgttagtttcactgtgtctctgtttagtttgtacttccatgatctgttcattgctaagagtgaggtgttaaagtcttctacaattattatatggagtgtgatgtgtgctttgagctttagtaaagtttcttttatgaatatgggtgcccttccttgcatttggagcatagatgctcagaattgagagttcatgttggtacttttcctttgatgagtatgaagtgtccttccttgtcttttttgataacttttggttgaaagtcaatattatttgatattagaatggctactctaacttgtttcttgggaccatgtgcttggaaaattgttttccagccttttactctgaagtagtgtctgcctttgtcactgaggtgtgtttcctgtaagcagcaaaatgctgggtcctgtttacctatctagtctgttagtctatgtctttttattggggaattgagtccattgatgttcagcgatattaaggaatagtgattgttgcttcctgttatttttgttattagagatggtattcacttcatggagctattttctcttgaaagattactttcttgctttttctagggcatagtttccctccttgtattggtgttttccatctattatcctttgtagggctggatttatggaaagatattgtgtaaatttggttttgtgataggatatcatggtttcttcttctctggtaattgagagttttggtgggtatagtaacctgggctggcattgtgttctcttaggatcttctggctttcatagtctctggtgagaagtctggtgtaattgtgatacctctgcctttatatgttacttgacctttttcccttactggttttaatattctttctttgtttagtgcatttagtgttttgattattatgtaatgggaggaatttcttttctggtccaaactatttggagttctgtaggcttcttatatgttcatgggcattttcttctttaagttagggaagtttttttctataatcttgttgaagatatttactggctctttaagttgtaaatcttcgctctcttctatacctattattcttaggtttggtcttctcatcctggatttcctggatgttttgggttaggagttggctttttgcattttctttgagtgttgtgtcaatgttttctatggtatcttctgcacctgagattttcctatctcttgtattctgttggtgatgcttgcatctatgactcctgatctcttttctaggttttcaaacttagggttgtctccctttgtgatttctttattgtttctacttccatttttagatcctggatggtttgttctgttctttggcctgtttgattgtgttttcctgtaattctttaagggatttttgtgtttactctttaagggcttctagctgtttacttgtgttctcctgtatttctttaagggagttatttatgtccttaaagttctctatcaccatcatgagaagtgattttagatctgaatcttgcttttctggtgtaatggtgtatccaggacttgctaccgtgagagaattgggttctgatgatgccaagtaaccttggtttctgttgcttatgttcttatgcttgcctcttgccatctgattatgtctagtgctacctgccctcactatatctgactggagcctgtccttcctggaattctggttatttcagaactcctcagagttcagctgtctctgtgatcccgtgattctgggatcctgggatcctgagatcctggatgtatcagagctcctgggagtgaagctgcctctgggaccctctgatcctagtgtgaccaaattccggggatcctgggtgtgttagagcacctgggagtggagcttcctctgggtgttgtgggactgactgcagatttcacacccaaggtctgcttagggcactggcccagaccagaagggtcttacaatctttctacctccttttctgcagggcttcctgagccctgagggggaaggaatagatggaaacatcccatttaggaccagtgttccagggtctcctactctctgcttatgggtctcagtatttatttccatctgctgcaggaggaagcttttctggtgatggctgagcatgacacggatctatgagtatagcagagtgaaatcattagaagtcattttgttgctatgttcctgcagaacagtagtatttgatttccccctaggtccctgacctctagtgtcagttcttcatcgtccaagcagtctatgatctgggttctatctcatggagcagtccttaaatccaatcagatattggttggttagtcccataagctttgtgacactatactgtactagtgcatcttgtatacagtcaccattgtagattgaagggttatagctgggtaagtgtttactgctctcctttggcagtgtgaggcatatcctccagtgccctaaccactagggcactactgattaggtacccctactgaggggcgcaggcaccagctcaacttttcttttctttttttttttttttccattttttattaggtatttaactcatttacatttccaatgctataccaaaagtcccccatatccacccacccccactcccctgcccacccactccccctttttggccctggtgttcccctgtactggggcatataaagtttgcaagtccaatgggcctctctttccagtgatggccaactaggccatcttttgatatatatgcagctagagtcaagagctccggggtactggttagttcataatgttgttccacctatagggttgcagatccctttagctccttggctactttctctagctcctccattgggagccctatgatccatccattagctgactgtgagcatccacttctgtgtttgctaggccccggcatagtctcacaagagatagctacatctgggtcctttcaataaaatcttgctagtgtatgcaatggtgtcagcgtttggatgctgatgatggggtggatccctggatatggcagtctctacatggtccatcctttcatctcagctccaaactttatctctgtaactccttccatgggtgttttgttcccaaatctaaggaggggcatagtgtccacacttcagtcttcattcttcttgagtttcatgtgtttagcaaattatatcttatatcttgggtatcctaggtttggggctaatatccacttatcagtgaatacatattgtgtgagtttctttgtgaatgtgttacctcactcaggatgatgccctccaggtccatccatttggctaggaatttcataaattcattctttttaatagctgagtagtactccattgtgtagatgtaccacattttctgtatccattcctctgttgaggggcatctaggttctttccagcttctggctattataaataaggctgctatgaacatagtggagcatgtgtccttcttacctgttggggcatcttctggatatatgcccaggagaggtattgctggatcctccggtagtactatgtccagttttctgaggaaccgccagactgatttccagagtggttgtacaagtctgcactcccaccaacaatggaggagtgttcctctttctccacatcctcgccagcatctgctgtcacctgaatttttgatcttagccattctgactggtgtgaggtggaatctcagggttgttttgatttgcatttcccctgatgattaaggatgttgaacattttttcaagtgcttctctgccattcggtattcctcaggtgagaattctttgttcagttctgagcccccattttttaatggggttatttgattttctgaagtccacctttcttgagttctttatatatgttggatattagtcccctatctgatttaggataggtaaagatccttttcccaatctgttggtggtctttttgtcttattgacggtgtcttttgccttgcagaaacattggagtttcattaggtcccatttgtcaattctcgatcttacagcacaagccattgctgttctgttcaggaatttttcccctgtgcccatatcttcaaggcttttccccactttctcctctataagtttcagtgtctctggttttatgtgaagttccttgatccacttagatttgaccttagtacaaggagataagtatggatcgattcgcattcttctacatgataacaaccagttgtgccagcaccaattgttgaaaatgctgtctttcttccactggatggttttagctcccttgtcgaagatcaagtgaccataggtgtgtgggttcatttctgggtcttcaattctattccattggtctacttgtctgtctctataccagtaccatgcagtttttatcacaaaaactctgtagtaaagctttaggtctggcatggtgattccaccagaggtacttttatccttgagaagactttttgctatcctaggttttttgttattccagacaaatttgcaaattgctccttccaattcgttgaagaattgagttggaattttgatggggattgcattgaatctgtagattgcttttggcaagatagccatttttacaatgttgatcctgccaatccatgagcatgggagatctttccatcttctgagatcttccttaatttctttcttcagagatttgaagtttttatcatacagatctttcacttccttagttagagtcacgccaagatattttatattatttgtgactattgagaagggtgttgtttccctaatttctttctcagcctgtttattctttgtatagagaaaggccattgacttgtttgagttaattttatatccagctacttcaccgaagctgtttatcaggtttaggagttctctggtagaatttttagggtcacttatatatactatcatatcatctgcaaaaagtgatattttgacttcctcttttccaatttgtatccccttgatctccttttgttgtcgaattgctctggctaggacttcaagtactatgttgaaaaggtagggagaaagtgggcagccttgtctagtccctgattttagtgggattgcttccagcttctctccatttactttgatgttggctactggtttgctgtagattgcttttatcatgtttaggtatgggccttgaattcctgatctttccaaaacttttatcatgaatgggtgttggatcttgtcaaatgctttttctgcatctaacgagatgatcatgtggtttttgtctttgagtttgtttatataatggattacattgatggattttcgtatattaaaccatccctgcatccctggaataaaacctacttggtcaggatggatgattgctttaatgtgttcttggattcggttagcgagaattttattgaggatttttgcatcgatattcataagagaaattggtctgaagttctctatctttgttggatctttctgtggtttaggtatcagagtaatagtggcttcataaaatgagttggatagagtaccttctacttctattttgtgaaatagtttgtcattctttaggtttgggaagttttcttctattattttgttgaagatattagctggccctttaagttgaaaatcttcattctcatcaattcctattatccgtaggtttggtcttctcattgtgtcctggattacctggatgttttgagttaggatccttttgcattttgtattttctttgactgttgtgtcgatgttctctatggaatcttctgcacctgagattctctcttccatttcttgtattctgttgctgatgcttgcatctatggttccagatctctttcctagggtttctatctccagcgttgcctcgctttgggttttctttattgtgtctacttccccttttagttctagtatggttttgttcatttccatcacctgtttggatgtgttttcctgtttttctttaatgatttctacctgtttggctgtgttttcctgcttttctttaagggcctgtaactctttagcagtgctctcctgtaattctttaagtgacttatgaaagtccttcttgatgtcctctatcatcatcatgaaaaatgtttttaaatctgggtctagattttcggttgtgttggggtgcccaggactaggtggggtgggagtgctgcgttctgatgatggtgagtggtcttgatttctgttagtaggattcttacgtttgcctttcgccatctggtaatctctgaagctagctgttttagttgtcactgttaagagcttgttcttcaggtgactctgttagcctctatgagcagacctggagggtagcactctccttagtttcagtgggcagagtattctctgcaggcaagctctcttcttgcaaggcaggtacccaaatatctggtattcaaaccagactcctggcagaagttgtgttccactcactagaggtcttaggatcacgtgtggaatcctgtgtgggcccttgcgggtgtcaggcgactcagctggcaaggtagcccggggctcgagtggagtggaaggggtttgtgccccagatcaatcccgggtagcctgcttccctatgtaccgcagtctcaagttccgcgcgattggattggggcaggcgctgtgttccactcaccagaggtcttagggtcccgtggggagtcccgtgtgggcccttgcgggtgttgggcaagactctgctggcaaggtagcccgggggtcgagtctcgagtcgagcggaagggacttgtgccccagatcaggcccgggtagcctgcttccctatgtaccgcagtctcaagttccgcgcgattggattggggcagacgctgtgttccactcaccagaggtcttagggtcccgtggggagtcccgtgtgggcccttgcgggtgttgggcaagactctgctggcaaggtagcccgggggtcgagtctcgagtcgagcggaagggacttgtgccccagatcaggcccgggtagcctgcttccctatgtaccgcagtctcaagttcccagctcaacttttctatgttcaatgaattgtgtaggtgttttcttcagcaataaagccttactatcaagagtgcctcttttgttgttcactgctgtggtacgccaggctgactggcctacaaacttcaaggggttctatctctaccttctatcttaccatgggaacacagtagtgttaaaagcaattgtatctagctttacatagtcttagtttcattacctgttactaacatgaaacaccagagtaaagcaacctaaagcagaaaggcttatttggctcaattccagttaagtctgttgttggagagaagtcaaggcagcagaaacgtgaacagtagcggtgagcagcagagctaacacacacaaagctggtgttcaactggccttctccgatcccatctcagggactggggtctgcgcacaattaagtgtcttcccatagtaatagaacttactaatcaattctcacagacgttctcagaggttaaacttaatctagagggttcctctcaggtgtaccaggctgggtgtcaagttgacagtgtgaactgtagcacagatctggggatctggactcatcttctcatgcttgtatttcaagcactttacccactgagccatctcccaagcccctcactctctaggctttgaaaagaaaaactttgtttaattcagctttagtaaataaaaatcctatgctagatattccgaggaatggggatttttaaaaattgttttttaaatacataccatttttatttcatctatttctgcctctcttaaaagtcgcataagtcacctttttttttttttataaagtagggtctctatatgcagcccaaactgaccagacacgcatgatcctcctgcctcctgagtgcttgaattgcagctgtatgccaccatactcggcttaagccaattctgtcctgaggatgggggactgctcgcacgtcttgtgtgtgtggaggccaggggttggcttggaatatttttattactctcgtcttattttctgagagaggacctgtaagttttccccactggagctcaccatttcacccagacccattcgccagcagtccccaagactctgcctgggtttgccccagcactgggtgccatgcatgaaccaccacacatggcttttatgtagttgctgggatctggactccgggccttactcttgcacaacaagcgtttgactcactgagccatctccccggctccctcaagtagcttcctcctgaggcttccacagaatgtttttctgtcttttaaagaatcatattctcagtattttcaaacacaattaagattgccagttcatacacagaaatgtaatcatacggagattcctgattcatgtccctccctcctaattcacttcatcagtgatcactgtgcacagaggaccaaatccgtaagcctgcaccactccctatgtggtcattcggagtcattgtaaccaggggttcctctgagctgtgtcaatgagcaagcaagggcggtccttacagatgccccagggacttatggtgatctgtggtatgatttgatgtttcagctggcgggggcagtgacctgagactctggaccgtgaatggggacctcgttggacatgtccactgcagagagatcatttgttctgtagctttctccaaccagcctgagggagtctccatcaacgtcattgctgggggattagaaaatggcattgtaaggtaagggaggacttgactcttcctcccggtcctggctcactgcagtttgagaaatgaattttaatgtctacacatattaaaatatagtatttagagatttagagtcactttggatgtaggtcttttttcctgttgtatttttacagtaaagctagtgcagcttggaagtatttactataaaatagtaaccatatgaaagtaggcagacttccctttcccacctacaatgcctgcagacttcccaaaggcaatgctgctctttgcagtaggttatcctggcaactcagcaaactgtgtgtgtgtgtgtgtgtgtgtgtgtgtgtgtgtgtgtgtgtgtgtgtgtggttttaatttgcataattgaataatggcttctcttccttccaggctatggagcacatgggacttgaagcctgtgagagagattacatttcccaaatcaaataagcccatcataaggtaagatctacctctaccttttattcttcattaaaaaaatgtgtagttctatttttttctgacattaaagcttatagacccaaagaatgcaggtgtgaaggcttcatgaaaagctaccctctaaccatgcaacaaatgacctgttaccagcaacaagccagcacagtcttgtgtggaactaagtgtctggtatctaatgtctagtggaaagacagctggctcagtgccaggaagcctcagggaccatagaaactgttgtttccacttccacctctgcagtgacagtcatgtgactggctgccacagggatgtgcttgacagaacaaacagcagtcacccttaactcagcttacagacttgcctttaaaacccaactagtagttataatattcaaactaaattaaaataaatttattttgattgtactgaaattaaaatttaatgaatctaagttatctattaattacattatacattgctttacctttttcctccaaagaagcaaaatatatctttaaaataaacgccacttaaggcctgggtgtggtggcacacgcctttaatccagcagctgggatgcagaggcaggtggatctgtgttctaggccagcctggtctacagagcaagtttctggaaatacatagaatgactctgtccaaatgaataaaaacacagatgtcatttgatttttaaaggcaaaatgtaatactgtgatctctttgtgatgtttctcccacccagggacctgagctctggggccccagttttattctagttaaactgagcctgagccttgtttgggggtggggggtgactgtgttagcatcaggcagcacagacagtctgctggccgtcttttcgtttatgattctctggagtggaaataccttagttgcagcatcacagtctatgcgttaagaactgatatgtaccaatgggtttgctttttcacagcctgacattctcctgtgatggccaccatttgtacactgccaacagtgaggggacagtgatcgcatggtgccggaaggaccagcagcgtgtgaagctgcccatgttctactctttcctcagcagctacgcagctggatgaagagaaggagtgtccccacaggacataagcaccgctctgcgagcctggctccaccaactgcagaagcagatgactgagcagatatccaggaaagacaacacacgtgcctctgtgcgcgcttccccagcctccgtgggcctgagagtaaagccctgccctcattccataatggcgtggaaggctgggtctgcacacactagccaattaaagtcagaatcttgatgctttttcccaaaaggttaggctgaatcaaagatcagggtctctgttctcctccgttttcaaaaagaaagagcagaacttaaattggctaattatttatctaaaatactaaacattatattttaaaagcatgtcccctatactcagcacacccaataaaaggaaacagaaaataggacttttcaggattcagaaagcaagttcttagtaggagcctctgcacccaatatatccggaacctctgaacagaacgtgagctctgctgctgcgtcactctcggccggctttgctgttgtcctctctgcccaaaggagagccaggggcacgagcttcagggactgttgcttccttcacatcctagctcctcataggcttctacttaaagtccataacactaggtatcagcgcccttggctcagtgactttcaaatataatggtaagtcttttagcacctgccgtaacagtccgtctgacagggctctgaactgtctgcactgggaagctccacacagcacctacagtgtaagcagtgtgatggaggcacagcagctaggaaagtgtgaaggaaggaaagcgagtgtgcagacagaggcagagtaagttacgtgttcctactaagctacgctctgagactcctggggcaggcactgtggcatgtgacagcagccccgctctggaactctgggactactgggctcttactcaaggtgctgctttgatggctttgaaaactattgtgtaggctcagaactatatcaccgtgggggagaagcatgtgttgctgcctataattgacttgtgcatttgttatggaaatctaattcatattatgtttacagaactacttttgtaacttccagactttgtaaaacattctgcttatatccacgagatgcaattccagagtctctgctgtggagacaggcacagggagagcattaggtcccattgacacgggccacctgtcactcctaaagtccacttcagaacagagacaacattactcctactcacgttgaagtgactgatttgtttttaaaaattcagctattgtctagctttcatttttttttttactgagaacctcaagttagtctcctattagaataggaatgctatgcagtcttggcttttttaagggccaagtttcatcatttatctaaagaggaaaatatgcaaaatatctggtcttgttaagcgtgcaatattctatttttatgtaaaaatttaaaaattccatgggggggattatttattgagcatgagacctaatatgtatatgttggaaacgctctgtaacatgcatgttatagcacacattcctggaagtcatcacatgctgttaccttttacacactgccacttcagtttggaaataaacttgctaaaaatagacttaaacctgtataaatgacttgtgaatgatgacgagatctcagtccatggctgttgcagaacaaggtgtatctggaagtcctgttactaatcactggttgtgctaggaccaatgttcttctcaaggaatggaacaacaacaagccatagttcactgctggtacaagtcaggactcaagatgagactgtatggctgcagccatgcagataagcacagataccatgtggctagagagaaggaaacaatagccaatggattagattaagagcaccatgaatagtaatagctcatgagacagggcctatgacagtctgcacctacagttgggctttatcacagcttagtcaggacagcagatgtgggaagaaacacagaattcagcagagatcagagtcagtagtgctctgtgtaagaatccacagtccattgagtcttcccagaagccaagaagcagatgcccttactaaagtacaggccatctgccctcgggcaccccaagactgctggattcattagtgtggccacaggaattcagtgtaggctggagaatagctgaatcactaataggccaaagcctgtcagcaagggctccaaatcaggtgtcacctgtgtggaagctgccacagggtctccctccccctcccaccttcttttcctccctccctcccctccacatatacacaccctgcaaggacagtccaagaaaccttagagttactgaacacaaatctcagtggtaggaatagaatacttccccgttagattttggccaatgagacccataaccctctaaacattagagccactattgttgcctgcccaacaaaactgagtggtaaggtgccactgccagagacatgacatcctttgcagaatgtagaaaatccaagctggaactaggcttgaagcattctctctgctgactagttctcatggtgccagaaggtgctatgcagttgctgggggaaaattgtcaccaatgctcctggttgatggtggatcctacatgctacaccatcaacatgccagccagcttgtgcccactggtgccttaagaacatgactgacagactcaaccaactaccttctcattggatttgaggccagcttcccaggagggaactctgggcagatacctgtgatggagaaactccgggcctctagtggagaagctactgctgtggttttgctaatgacttggtgtgcctttcatattgctttataaacacttatttttacccccatagttagtgaggttagtcgggtttgctttgaaagactttctgcagtgtgcagtaatgactgcagaactcataactggttagaacagggtcagagtgctcagcataagtgacgtgactgctcggccctaactgagacatctgtattgtacataagtctcagggaacattgtggaagagggaatgaagataatgtaagaagtggaagagagtcgggtgtggtgggatgctgtcctttgggcctgtcctgcccactgtcttttttaaactttaactcattgtgactactctcaggaaagctgcacacgactgcccattaactttttgtcactctggggagaggcccaaagccatctctgccccaaggatctatagttaatggttgctaatagagagtggttcacaagccccaggatctccccgcaacctgagcattcatgggcagataaccgttgctagggctgaggtgctcacaaagcccctcttctctgagggtttgttggcagttaacaggctctggttaactgcccccataaaggcttattgatagttaacattgctggaggagaggctctcaagctcccacccctacagagaatttatagttaatggttgctctgaagagaggctcacatggccatgcccctttctgatggcacttaagagttacaggagaattttttttttccttcagtggtatccatgcttctgtaagaaaccctaattaaacacagtggttcaccagtctacagttgagttaaatcacttgcttgtctctggggtcctatctgaggtgagatgtttgttcttgtctcctcgggaaagttcacacaacagtggcgttttaaggaaccccatctgttccttttgtttggcctataaatttctaccactaggaatagataaggcagctcccattccttaattttagtgtttgttctaaaatgctaaatttcaacctttcgtatccttaaatgaactttacacatcagttccaaaaccagcctctcgttttgaatagaagagtgtgtgtccctctccttgtggcagacctgtattgagaatggagctgaggatgtaaaacagttcagttcctctgcctcctgctcatcccaggctgctgagaagccacgggtggagatgatctggagagctcctaccactgagctacattcccagcccttatttggtaagacaaggtttctgtgtagcttagggtggcctgacacttccagtcctcctgagctctaggaggcatgtacctctttgcccaggtggagagccgccttagtgactaaagtgttactgcaacataatggatgggtagaaatataagtgaactgagacatcaatgtgttgactaggacacattccaagacctccgtgccagcagcaggtccaggccagggatagaaaggaggatcttcctgtatccctgcccgagcatcatcaggtgtctgcaggcacagaaggcacaggagtgggaactgctgcatctgcatctgcctgcatctgtggtgtgtcgaagcttttcaatctggtttagtgtttttctgtcctggggacctcggcagcagcgcttcattggtgtgagcctgccaatccctctgtctgactgtttggatatctaaggatgtagaaaggagagaggccagatgttccccagccctccagagctcttccctagctctctgttgcctgctatgttggataacttgctaatgccccatctcaacaaagaagagctacttacagtgtccataaggaaggctcagaaaagtaggaagagaagaaaaaggcaccatggttttactttatgttgagttatctttctcaggagcctctttcattgctgattacactttagctgttccctgttggtccctacataagcaaacaaaacgtctcaaattgttcccaaatgtgtctcatgttttggacagctttaccattttccctgagaattcttctaatcagggcaacattttatgcattatgaaatctagacacttcaaaaaccagcaggcttggtttaagttagcaccttcctcagagaagcaggggagggaggaggagtggggggatggagacttgccatttaaaaggccagttcagcgttaaggccagaagagatcagggaaagcacactcagagtaacatgcatggctctatttcttccagtgatgtccaatgtaaaaccacagaagcagctacagttgctaaaaacaaaaacaaacaaacaaacaaacatgtaaatgcactgtacattacatgacatgggcaaaaaggcatgccctgctgctactggagggaaattctgtagcccaggcctctgaagactgaggctgggatcagtgttcctgctgaagccttgcaaggttcttccctcgtgagcagagcccatgagaggtaggtttttaaaaggtgatcccgtggcattggttcattcccaatgtgaagtaagctggtctcacccagctcctattggctgatcacaggaagccttctttttattctcaaattttgatcttgtccaaatcgtttttaaaatccagttccaaagggtttttttatgttgttttctgagattttagttaaatctacactatagttttcatagtggttgaataacttagattcctttcctgttgctctgatatgtatcttgacaagagccacttgttaaataaatttgagactgacacatatgaattgaacacatatgtcctatcagaggttatcacagctacatttagatttactgataatttcttatttagatattattgtctgccgtaccagaagcaattggtctctttgagtcggctgcccctctacccttgtactcaacactgaatcaactccgttgcttttaattatccttaatcatgatatacttaggatatttaatgtgtcccagaggtccgatgtgttactcgtttggcccccagaagggctgctcctggaagagggtagggtctttgtataggaggctgcccaaaaggatacaactccctccagagccctagagactgaatattggtctgacaagaaggggcctgggagaaatggaggagtcccagtagccacccagtctaccggagagtttatctattgaagtgccatgcagttgaacagttggcacaactcgttagaattctggtgagaggaaacctaaggtcaactttcctgcagctggtttgtggaaagagtgtacaaccgagccagggcttgcaggggagacgtgaatccaagaggaaaaatagtggacacgattgtgtgctgcttgaattttcaacagtagtgactataggatctcagcctctgccttgtgaatattactggctaaatcattgcgacgtcatttaattctgaggcctaaagggactcctgggaactgtgaagacaatcagtgtgatttcccaccccactgcgtctttccagcctctctgggcagtttcactcagcagcctaagtgcacctctgtccacggtactgtgaggcatgtcagatagatatgcgaaaatctaaggcaccctgtgtagtgtcactttctgcagggatagttagggaaggtgaacaggaggaaggaagattttcaagaaatctgtcagtggtgttcagacagaagtaatacggtttcctccttctttatgcatttactgcctgaaatgttttctctgcttctgtcttcagagggctttgtattatttcctgagttgaaaaacagacgtggctgaagctgcgtctcaaggaagaggagtttggtaattcatcggtttacaatgagactcacaaaacacagttccattaggacgaggcttggcaggccatgaccatctcaccgttgggagtcgccaggattccccgtggcagcagttccttgctgtccactcacacccttgtgactggctgggaggcagctgttctgccaagcctggccgggtggcggtcttgcccgcgttgcttagcgacgtctgcgtaagattggtgcgcatttccagatgttcagcatctgcgctaacagcgcccaccttcctcggcgtgaggcaccctaggtgtccccaggtgaagtaccctgagctggccgtccccactctgcacttggggatctgcctcgagccataaaccctccaaggctgcgcactccccgggagggcgggtttgggtgaggcccgggatttggggcgcgcggagcccggagtgggagccccagtgacgcaccagtgacgtcggcggcggcgggcgggatttcccggcccctcccggcgcgggaggagacctgctgcgaaggagtgggtgcggccagcgtggcgcagcaggcgagggttggggggtcaccgtcttgcacccagtgggcccactgcgcagacccgaggtcccgcttgcgggtggctttgctgtggcttgtgctccgtgccgcgcccccttttctccccagacgcgcagggtcttctgtggtccgggaccccgcgggtggcgacgcggggcgcgctttcactgagcccggggcgagcgatgccgcttggcctggccaaccccgtcgagcgccgcgccggggacccagcccgcgtctgagcagcgccggctgcgcgccggctgcggtaagtggcgcccgaggcccccgggagggcgcggcgcctcgtcggggaacctcggtccgggccccgacagctccgagagaccctgggcgaaatctaaaagtctcagaactgaagagatattctagctcctgggtcttccctggaggtgcctcagcacgcttcacaaagacctgtggttcgttgtggtggcggccgcttggtgcacggccgcggggcgcctccagcctaagcctccctaatgtccacaggtagcccgagtctcgggggacacagccgaatcccccggggtcgaggagggccgaggccctcatgggactcttcttcatcagtggggcgtagaggtcccttatggctggccatgatcataaaggacgccccctcgtcccaccccccaccatgcagaagatcacaggagatggatggcatggccactgataattttgtttggagcagtgttttggcaggggttcgcagacgctctctgctttcccgacgccaggacaactgcctggggtagagagggaagagcacggtgacctgggcgagtttgtgccctccctctcgatggcgactgtccccgaagcaggtgctgaaacgcgctgctgagctcacggggcatagctttgggagagcgagctttgctttaatttttagtctcctgggaaataatgaggcaagatgccagttatggctgcaaaaggctccttcatttagactagtctgcttcttgtcgtgtattttgagctaagatgtgagcgagggtacttgcaaatgtgaaagtttgatccagtgatagataaatcccgtcctcgcttcccaggcctccggggtctgtaaaaggctggcagcagacaggccggcgtttcagccagagcaagtctgcgagaccgtgctagggttccggtgaaaaagcgtcactcctgccgtctgctccaaagcgaggtgtgatggcccccaaggctgcagctaggctcttgggctgcgtgcaggctgcctggttcttcattactggggcaccaccgcccttttcctcttgttggcttgcaaggaggaaggcagccacctcctcctctggtcctgttaacctggtattggccacttgggggtgggatggggaagacctggtgctttcagtcctgagaaacaagacacaaggtgcttgtaaactgtacttggggtttctggatttctccggcctgctgagaggtggcgatgaaaatgcagaacctgctggggtgcgttgctagccaagggactctcgggctcagagctatggaacctgcaaccgttaggccccagtcctttcccctcctaataaaacccatggaggaagcaatggagggaattttggggcagggaactgcacagggaaggaagggccatcctgactagtttatgcctgtctgactagctgccatccccccttttcatggtagtctgtgagaaagtacccataggggagatttcccttgttcattccctagaatctgaagaatggccatccccaaagctcccaaatctccatcgctcttcataattgtggatttttagatggcacagggcccttgcctctggcctgtctcagggtccctggacacctgggacggagagtggctgtgtttgcttccacccagggcacagtcacactcagcacctgccagggatgcagcccagcagtactgccagatcccactgccaccttcctgactttgtctcactttgtctgctcgacagggggtggggggatggggggtgtcttggcagggtgtattgggagtgcctttgggggaaatttgaagcaatgtctgatattttttttctgtgtagtcctggctgtcctcgaattcagaaatccgcctgcctctgcctcccaagtgctgggactgaaggtgtttgccatcactgcccggcctaatgtcggatttaaaaaaaaaaaatctacattctgctatccaatctgataatttccttttttttttctcctttgcaacatctttattgcctttagacaaattcaagctctgagactttaagtcttcaggtcacagttattcattcatttttcttagaccaaacaccaaaacatcttaaattctccaaaaacatcaacactggatatcacatagatttccactgaaagtcagagaaaccacataagtgtcaaagtaggaccatgctactggaaggctttaagtggctacctaaaaactaagaataagccaaggcctttcaagaaaccagaggggaagacacaaatggagtgtccacacagggaacaaaacagaggcgagaaaagctcctgaaagattcatgtggaaagatggggacatgcacaaagagattggtgcactgagctacggagccattgtggcagcagctgctgcagttgctggcagatgggactgtgtgttgcttactgtaggtgggccttgctgccctcgaggggtgaggacacataagtagtagtggagacacagtaaatcatgtgcccttgaggtctcggggtgtctacaggcagatccacaaaggctgggcctatcggaggtaggcagggcagagcccaggtgagcaggcccagggctgaatcgcaggtcttactgggcacatgatgggaatagcctcagttgatcctcatgtgacacttgctgggttggggttttgcaaagcatcatagttggaaagtgttgtggcagtgccctcggtggatggtggggacttcagtgaaagtatgcagagatgacaagtgacatgaccgagccacatggaggggaagagtgagtaactgaggctggatgtggctcc

SEQ ID NO: 3207 - DNA, 5858 bp, Mus musculus
tgagagctcacgctggcctggcagccttggtgagtcgggattctcctgcaccggcgggcgagagcgcgcggcggaccacagagcggaggtgaagccttatgctgagacagttttatctagttcatgaacccaaattatatacaagctgaatgttacagaagtgctgaaagactgctctgtcatgagcacggacagcaactcattggcacgtgagtttctgattgatgtcaaccagctttgcaatgcagtggtccagagggcagaagccagggaagaagaagaagaggagacacacatggcaactcttggacagtaccttgtccatggacgaggatttctgttacttaccaaactaaattctatcattgatcaggccctgacatgcagagaagaactcctgactcttcttctgtcgctccttcccttggtgtggaagatacctgtccaggaacagcaggcaacagattttaacctgccactgtcatctgatataatcctgaccaaagaaaagaactcaagtttgcaaaaatcaactcagggaaaattatatttagaaggaagtgctccatctggtcaggtttctgcaaaagtaaacctttttcgaaaaatcaggcgacagcgtaaaagtacccatcgttattctgtaagagatgcaagaaagacacagctctccacctctgactccgaaggcaactcagatgaaaagagtacggttgtgagtaaacacaggaggctccacgcgctgccacggttcctgacgcagtctcctaaggaaggccacctcgtagccaaacctgacccctctgccaccaaagaacaggtcctttctgacaccatgtctgtggaaaactccagagaagtcattctgagacaggattcaaatggtgacatattaagtgagccagctgctttgtctattctcagtaacatgaataattctccttttgacttatgtcatgttttgttatctctattggaaaaagtttgtaagtttgacattgctttgaatcataattcttccctagcactcagtgtagtacccacactgactgagttcctagcaggctttggggactgctgtaaccagagtgacactttggagggacaactggtttctgcaggttggacagaagagccggtagctttggttcaacggatgctctttcgaaccgtgctgcaccttatgtcagtagacgttagcactgcagaggcaatgccagaaagtcttaggaaaaatttgactgaattgcttagggcagctttaaaaattagagcttgcttggaaaagcagcctgagcctttctccccgagacaaaagaaaacactacaggaggtccaggagggctttgtattttccaagtatcgtcaccgagcccttctactacctgagcttctggaaggagttctacagctcctcatctcttgtcttcagagtgcagcttcaaatcccttttacttcagtcaagccatggatttagttcaagaatttatccagcaccaaggatttaatctctttgaaacagcagttcttcagatggaatggctgctttcaagggacggtgttccttcagaagctgcagaacatttgaaagctctgataaacagtgtaataaaaataatgagtactgtgaaaaaggtgaaatcagagcaacttcatcattccatgtgcacaaggaaaagacaccggcgttgtgagtattcccacttcatgcagcaccaccgcgatctttcagggctcctggtttcagcttttaaaaatcagctttctaaaagcccctttgaagagaccgcagagggagatgtgcagtatccagagcgctgctgctgcatcgccgtgtgcgctcaccagtgcttgcgcttgctgcagcaggtttccctgagcaccacgtgtgtccagatcctatcaggtgtacacagtgttggaatctgttgttgtatggatcctaagtctgtgatcgtccctttactgcatgcttttaagttgccagcactgaaagctttccagcagcatatactgaatgtcctgagcaaacttcttttggatcagttaggaggagcagagctatcaccgagaattaaaaaagcagcttgcaacatctgtactgtggactctgaccaactggctaagttaggagagacactgcaaggcaccttgtgtggtgctggtcctacctccggcttgcccagtccttcctaccgatttcaggggatcctgcccagcagcggctctgaagacttgctgtggaagtgggatgcattagaggcttatcagagctttgtctttcaagaagacagattacataacattcagattgcaaatcacatttgtaatttaatccagaaaggcaatgtagttgttcagtggaaattgtataattatatctttaatcctgtgctccaaagaggagttgaattagtacatcattgtcaacagctaagcattccttcagctcagactcacatgtgtagccaactgaaacagtatttgcctcaggaagtgcttcagatttatttaaaaactctacctgtcctacttaaatccagggtaataagagatttgtttttaagttgtaatggagtaaaccaaataattgaactaaattacttagatgggattcgaagtcattccctgaaagcatttgaaactctgattgtcagcctaggggaacaacagaaagatgctgcagttctagacgtcgatgggttagacatccaacaggagttgccgtccttaagtgtgggtccttctcttcataagcagcaagcttcttcagattctccttgcagtctcaggaagttttatgccagcctcagagagcctgatccaaaaaaacgaaagaccattcaccaggatgttcacataaacaccataaacctcttcctctgtgtggcttttctatgtgtcagtaaagaagcagactctgatagggagtctgccaatgagtcagaagatacttctggctatgacagcactgccagtgagccattaagtcacatgctaccatgtctgtctcttgagaacgttgtcttaccttcccctgaatgtttgcaccatgcagcagacatttggtccatgtgtcgttggatctacatgttgaactcagtcttccagaaacaatttcacaggcttggtggtttccaagtgtgccatgaattaatatttatgataatccagaaactattcagaagtcatacagaggatcaaggaagaaggcagggagaaatgagtagaaatgaaaaccaagagctaatcaggatatcttaccccgagctgacactgaagggagatgtatcatctgcaacagcaccagacctgggatttctgagaaagagtgctgacagcgtgcgtggattccagtcacagcctgtgcttcccacaagtgcagagcagattgtggctactgaatctgttcctggggaacgaaaggcatttatgagtcaacaaagtgagacttctctccagagcatacgacttttggagtctctcctggccatttgtcttcatagtgccagagcctgtcaacagaagatggaattggagctaccgtctcagggcttgtctgtggaaaatatattgtgtgaactgagggaacacctttcccagtcaaaggtggcagaaacagaattagcaaagcctttatttgatgccctgcttcgagtagccctggggaatcattcagcagatttgggccctggtgatgctgtgactgagaagagtcatccctctgaggaagagctgttgtcccagcccggagatttttcagaagaagctgaggattctcagtgttgtagtttgaaacttctgggtgaggaagaaggctatgaagcggatagtgaaagcaatcctgaggatgttgacacccaagacgatggagtagaattaaatcctgaagcagaaggtttcagtggatcgattgtttcaaacaacttacttgaaaacctcactcacggggaaataatataccctgagatttgcatgctgggattaaatttgctttctgctagcaaagctaaacttgatgtgcttgctcatgtgtttgagagctttctgaaaattgtcaggcagaaggaaaagaacatttctctcctcatacaacagggaactgtgaaaatccttctaggcgggttcttgaatattttaacacaaactaactctgatttccaagcatgccagagagtactggtggatctcttggtatctttgatgagctcaagaacgtgttcagaagacttaactcttcttttgagaatatttctggagaaatctccttgtacagaaattcttctccttggtattcacaaaattgttgaaagtgattttactatgagcccttcacagtgtctgacctttcctttcctgcataccccgagtttaagcaatggtgtcttatcacagaaacctcctgggattcttaacagtaaagccttaggcttattgagaagagcacggatttcccgaggcaagaaagaggctgatagagagagttttccctataggctgctttcctcttggcatatagccccaatccacctgccgttgctgggacagaactgctggccacacctgtcagaaggatttagtgtttctctgtggtttaatgtggaatacatccatgaatccgagagtgctgcagaaaggggaaaaagagtaaagaaaagaaacaaaccatcagttctggaagacagcagttttgaaggagcaggtatgatggcagggtctgatctatatactaagattcttcaaatagctgtttgcctgagttttaagcatatctggcagtattttaatgtattctttaaatgttattcaccttaaagatcctacttcactactgaattaccaaagcctgagttttcaaacagccttgaaatcttcattgtctctaaactttagatagggaagtggggatgctctgtttctgcaacagctgttgaagttagcagtcccatgactgtgttagtgtggcttctgatactagatagttataaataaaaccctatggccatttttattttaagttctccttctgtgtcttacaccaatggccccttctagttactgtccctgatcatttatatgtaacagtccaaagttagaacagagttcatctgtaactgaagaactgctgttaggatgtattgaaattgaattttgtttttgttctcttcttttttaagcaatcaacagtttcttaagtcatatagcagctagaggaagtagtcttaaaaactggctgtgtatttttttaacctgttaaaaatggtggctaatatttttataccctaataattgataatgttcctcttttttaaaagtctgagcttttggacatgcactgtttattttagtacatcttagcttagtttaacataaagtcacatcatagtaacaaatagcttatcacacatattccacctgccattgctgtcacagataatgggaatatagaggcaactcaagatttaagtagtaagatgccattgggaggggtaagcagctagctcacagccataaacacttctctcagcggagacaaactgtgattcagggtttggcatcacttagcatgtttatttcaaggttgttcactaccttaaataatgatcatttgagcagtgcagcttttctaagaagagtattaataatattatagatcgtgcctttgtaacaatttttttagtgcaaggcatctgttgatggcatgtgctccctgggccatggtcagttgtgttagagtgacccaatccaacaaaagcagaaccttggtatggagtgtggctgacgatggtcctttagcaccctcaggccttgtagtttaaagcatttaataacttttaaaacactggagtttttttga

SEQ ID NO: 3208 - protein, 1532 aa, Mus musculus
MSTDSNSLAREFLIDVNQLCNAVVQRAEAREEEEEETHMATLGQYLVHGRGFLLLTKLNSIIDQALTCREELLTLLLSLLPLVWKIPVQEQQATDFNLPLSSDIILTKEKNSSLQKSTQGKLYLEGSAPSGQVSAKVNLFRKIRRQRKSTYSVRDARKTQLSTSDSEGNSDEKSTVVSKHRRLHALPRFLTQSPKEGHLVAKPDPSATKEQVLSDTMSVENSREVILRQDSNGDILSEPAALSILSNMNNSPFDLCHVLLSLLEKVCKFDIALNHNSSLALSVVPTLTEFLAGFGDCCNQSDTLEGQLVSAGWTEEPVVQRMLFRTVLHLMSVDVSTAEAMPESLRKNLTELLRAALKIRACLEKQPEPFSPRQKKTLQEVQEGFVFSKYRHRALLLPELLEGVLQLLISCLQSANPFYFSQAMDLVQEFIQHQGFNLFETAVLQMEWLLSRDGVPSEAAEHLKALINSVIKIMSTVKKVKSEQLHHSMCTRKRHRRCEYSHFMQHHRDLSGLLVSAFKNQLSKSPFEETAEGDVQYPERCCCIAVCAHQCLRLLQQVSLSTTCVQILSGVHSVGICCCMDPKSVIVPLLHAFKLPALKAFQQHILNVLSKLLLDQLGGAELSPRIKKAACNICTVDSDQLAKLGETLQGTLCGAGPTSGLPSPSYRFQGILPSSGSEDLLWKWDALEAYQSFVFQEDRLHNIQIANHICNLIQKGNVVVQWKLYNYIFNPVLQRGVELVHHCQQLSIPSAQTHMCSQLKQYLPQEVLQIYLKTLPVLLKSRVIRDLFLSCNGVNQIIELNYLDGIRSHSLKAFETLIVSLGEQQKDAAVLDVDGLDIQQELPSLSVGPSLHKQQASSDSPCSLRKFYASLREPDPKKRKTIHQDVHINTINLFLCVAFLCVSKEADSDRESANESEDTSGYDSTASEPLSHMLPCLSLENVVLPSPECLHHAADIWSMCRWIYMLNSVFQKQFHRLGGFQVCHELIFMIIQKLFRSHTEDQGRRQGEMSRNENQELIRISYPELTLKGDVSSATAPDLGFLRKSADSVRGFQSQPVLPTSAEQIVATESVPGERKAFMSQQSETSLQSIRLLESLLAICLHSARACQQKMELELPSQGLSVENILCELREHLSQSKVAETELAKPLFDALLRVGNHSADLGPGDAVTEKSHPSEEELLSQPGDFSEEAEDSQCCSLKLLGEEEGYEADSESNPEDVDTQDDGVELNPEAEGFSGSIVSNNLLENLTHGEIIYPEICMLQLLSASKAKLDVLAHVFESFLKIVRQKEKNISLLIQQGTVKILLGGFLNILTQTNSDFQACQRVLVDLLVSLMSSRTCSEDLTLLLRIFLEKSPCTEILLLGIHKIVESDFTMSPSQCLTFPFLHTPSLSNGVLSQKPPGILNSKALGLLRRARISRGKKEADRESFPYRLLSSWHIAPIHLPLLGQNCWPHLSEGFSVSLWFNVEYIHESESAAERGKRVKKRNKPSVLEDSSFEGAGMMAGSDLYTKILQIAVCLSFKHIWQYFNVFFKCP

SEQ ID NO: 3209 - DNA, 11811 bp, Mus musculus
tgagagctcacgctggcctggcagccttggtgagtcgggattctcctgcaccggcgggcgagagcgcgcggcggaccacagagcggaggtgaagccttatgctgagacagttttatctagttcatgaacccaaattatatacaagctgaatgttacagaagtgctgaaagactgctctgtcatgagcacggacagcaactcattggcacgtgagtttctgattgatgtcaaccagctttgcaatgcagtggtccagagggcagaagccagggaagaagaagaagaggagacacacatggcaactcttggacagtaccttgtccatggacgaggatttctgttacttaccaaactaaattctatcattgatcaggccctgacatgcagagaagaactcctgactcttcttctgtcgctccttcccttggtgtggaagatacctgtccaggaacagcaggcaacagattttaacctgccactgtcatctgatataatcctgaccaaagaaaagaactcaagtttgcaaaaatcaactcagggaaaattatatttagaaggaagtgctccatctggtcaggtttctgcaaaagtaaacctttttcgaaaaatcaggcgacagcgtaaaagtacccatcgttattctgtaagagatgcaagaaagacacagctctccacctctgactccgaaggcaactcagatgaaaagagtacggttgtgagtaaacacaggaggctccacgcgctgccacggttcctgacgcagtctcctaaggaaggccacctcgtagccaaacctgacccctctgccaccaaagaacaggtcctttctgacaccatgtctgtggaaaactccagagaagtcattctgagacaggattcaaatggtgacatattaagtgagccagctgctttgtctattctcagtaacatgaataattctccttttgacttatgtcatgttttgttatctctattggaaaaagtttgtaagtttgacattgctttgaatcataattcttccctagcactcagtgtagtacccacactgactgagttcctagcaggctttggggactgctgtaaccagagtgacactttggagggacaactggtttctgcaggttggacagaagagccggtagctttggttcaacggatgctctttcgaaccgtgctgcaccttatgtcagtagacgttagcactgcagaggcaatgccagaaagtcttaggaaaaatttgactgaattgcttagggcagctttaaaaattagagcttgcttggaaaagcagcctgagcctttctccccgagacaaaagaaaacactacaggaggtccaggagggctttgtattttccaagtatcgtcaccgagcccttctactacctgagcttctggaaggagttctacagctcctcatctcttgtcttcagagtgcagcttcaaatcccttttacttcagtcaagccatggatttagttcaagaatttatccagcaccaaggatttaatctctttgaaacagcagttcttcagatggaatggctgctttcaagggacggtgttccttcagaagctgcagaacatttgaaagctctgataaacagtgtaataaaaataatgagtactgtgaaaaaggtgaaatcagagcaacttcatcattccatgtgcacaaggaaaagacaccggcgttgtgagtattcccacttcatgcagcaccaccgcgatctttcagggctcctggtttcagcttttaaaaatcagctttctaaaagcccctttgaagagaccgcagagggagatgtgcagtatccagagcgctgctgctgcatcgccgtgtgcgctcaccagtgcttgcgcttgctgcagcaggtttccctgagcaccacgtgtgtccagatcctatcaggtgtacacagtgttggaatctgttgttgtatggatcctaagtctgtgatcgtccctttactgcatgcttttaagttgccagcactgaaagctttccagcagcatatactgaatgtcctgagcaaacttcttttggatcagttaggaggagcagagctatcaccgagaattaaaaaagcagcttgcaacatctgtactgtggactctgaccaactggctaagttaggagagacactgcaaggcaccttgtgtggtgctggtcctacctccggcttgcccagtccttcctaccgatttcaggggatcctgcccagcagcggctctgaagacttgctgtggaagtgggatgcattagaggcttatcagagctttgtctttcaagaagacagattacataacattcagattgcaaatcacatttgtaatttaatccagaaaggcaatgtagttgttcagtggaaattgtataattatatctttaatcctgtgctccaaagaggagttgaattagtacatcattgtcaacagctaagcattccttcagctcagactcacatgtgtagccaactgaaacagtatttgcctcaggaagtgcttcagatttatttaaaaactctacctgtcctacttaaatccagggtaataagagatttgtttttaagttgtaatggagtaaaccaaataattgaactaaattacttagatgggattcgaagtcattccctgaaagcatttgaaactctgattgtcagcctaggggaacaacagaaagatgctgcagttctagacgtcgatgggttagacatccaacaggagttgccgtccttaagtgtgggtccttctcttcataagcagcaagcttcttcagattctccttgcagtctcaggaagttttatgccagcctcagagagcctgatccaaaaaaacgaaagaccattcaccaggatgttcacataaacaccataaacctcttcctctgtgtggcttttctatgtgtcagtaaagaagcagactctgatagggagtctgccaatgagtcagaagatacttctggctatgacagcactgccagtgagccattaagtcacatgctaccatgtctgtctcttgagaacgttgtcttaccttcccctgaatgtttgcaccatgcagcagacatttggtccatgtgtcgttggatctacatgttgaactcagtcttccagaaacaatttcacaggcttggtggtttccaagtgtgccatgaattaatatttatgataatccagaaactattcagaagtcatacagaggatcaaggaagaaggcagggagaaatgagtagaaatgaaaaccaagagctaatcaggatatcttaccccgagctgacactgaagggagatgtatcatctgcaacagcaccagacctgggatttctgagaaagagtgctgacagcgtgcgtggattccagtcacagcctgtgcttcccacaagtgcagagcagattgtggctactgaatctgttcctggggaacgaaaggcatttatgagtcaacaaagtgagacttctctccagagcatacgacttttggagtctctcctggccatttgtcttcatagtgccagagcctgtcaacagaagatggaattggagctaccgtctcagggcttgtctgtggaaaatatattgtgtgaactgagggaacacctttcccagtcaaaggtggcagaaacagaattagcaaagcctttatttgatgccctgcttcgagtagccctggggaatcattcagcagatttgggccctggtgatgctgtgactgagaagagtcatccctctgaggaagagctgttgtcccagcccggagatttttcagaagaagctgaggattctcagtgttgtagtttgaaacttctgggtgaggaagaaggctatgaagcggatagtgaaagcaatcctgaggatgttgacacccaagacgatggagtagaattaaatcctgaagcagaaggtttcagtggatcgattgtttcaaacaacttacttgaaaacctcactcacggggaaataatataccctgagatttgcatgctgggattaaatttgctttctgctagcaaagctaaacttgatgtgcttgctcatgtgtttgagagctttctgaaaattgtcaggcagaaggaaaagaacatttctctcctcatacaacagggaactgtgaaaatccttctaggcgggttcttgaatattttaacacaaactaactctgatttccaagcatgccagagagtactggtggatctcttggtatctttgatgagctcaagaacgtgttcagaagacttaactcttcttttgagaatatttctggagaaatctccttgtacagaaattcttctccttggtattcacaaaattgttgaaagtgattttactatgagcccttcacagtgtctgacctttcctttcctgcataccccgagtttaagcaatggtgtcttatcacagaaacctcctgggattcttaacagtaaagccttaggcttattgagaagagcacggatttcccgaggcaagaaagaggctgatagagagagttttccctataggctgctttcctcttggcatatagccccaatccacctgccgttgctgggacagaactgctggccacacctgtcagaaggatttagtgtttctctgtggtttaatgtggaatacatccatgaatccgagagtgctgcagaaaggggaaaaagagtaaagaaaagaaacaaaccatcagttctggaagacagcagttttgaaggagcagaaggtgatagaccagaagttacagaatccatcaatcctggtgacagactcatagaagacggctgtattcatttgatttcactggggtccaaagcattgatgatccaagtgtgggctgatccccacagtggcacttttatctttcgtgtgtgcatggactcaaatgatgacacgaaagctgtctcactagcacaggtggaatcacaggagaatattttctttccaagcaaatggcaacacttagtacttacctatattcagcatcctcaagggaaaaagaatgtccatggggaaatctccatatgggtctctgggcagaggaagactgatgtcatcttggattttgtgctcccaagaaaaacaagcttatcatcagacagcaataaaacattttgcatgattggtcattgcttaacatcccaagaagagtctctgcaattagctggaaaatgggacctggggaacttgctcctcttcaatggagctaaaattggctcacaagaggcctttttcctgtatgcttgtggacccaactacacatccatcatgccgtgtaaatatggacagccagtcattgactactccaaatacattaataaagacattttgagatgtgatgaaatcagagacctttttatgaccaagaaagaagtggatgttggtctcttaattgaaagtctttcagttgtttatacaacttgctgtcctgctcagtacaccatctatgaaccagtgattcgactcaagggccaagtgaaaactcagccctctcaaagacccttcagctcaaaggaagcccagagcatcttgctagaaccttctcaactcaaaggcctccaacctacggaatgtaaagccatccagggcattctgcatgagattggtggggctggcacatttgtttttctctttgctagggttgttgaacttagtagctgtgaagaaactcaagcattagcactgcgggttatactgtctttaattaagtacagccaacagagaacacaggaactggaaaattgtaatggactctctatgattcaccaagtgttggtcaaacagaaatgcattgttggctttcacattttgaagacccttcttgaaggttgctgcggtgaagaagttatccacgtcagtgagcatggagagttcaagctggatgttgagtctcatgctataatccaagatgttaagctgctgcaggaactgttacttgactggaagatatggaataaggcagagcaaggtgtgtgggagactctgctagcagctttggaagtcctcatccgggtagagcaccaccagcagcagtttaatattaagcagttgctgaacgcccacgtggttcaccacttcctactgacctgtcaggttttacaggaacacagagaggggcagcttacatctatgccccgagaagtttgtagatcatttgtgaaaatcattgcagaagtccttggttctcctccagacttggaattattgacagttattttcaatttcctgttagctgtacaccctcctactaatacttatgtttgtcacaatcccacaaacttctacttctctttgcacatagatggcaagatctttcaggagaaagtgcagtcactcgcgtacctgaggcattctagcagcggagggcaagcctttcccagccctggattcctggtaataagcccatctgcctttactgcagctcctcctgaaggaaccagttcttccaatattgttccacagcggatggctgctcagatggttcgatctagaagtctaccagcatttcctacttatttaccactaatacgagcacaaaaactggctgcaagtttgggttttagtgttgacaagttacaaaatattgcagatgccaacccagagaaacagaatcttttaggaagaccctacgcactgaaaacaagcaaagaggaagcattcatcagcagctgtgagtctgcaaagactgtttgtgaaatggaggctcttcttggagcccacgcctctgccaatggggtttccagaggatcaccgaggttccccagggccagagtagatcacaaagatgtgggaacagagcccagatcagatgatgacagtcctggggatgagtcttacccacgtcggcctgacaacctcaagggactggcctcattccagcgaagccaaagcactgtcgcaagccttgggctggcgtttccctctcagaatggatctgcagttgctagcaggtggccaagtcttgttgataggaatgctgatgactgggagaactttaccttttctcctgcttatgaggcaagctacaaccgagccacaagcacccacagtgtcattgaagactgtctgatacctatctgctgtggattatatgaactcttaagtggggttcttcttgtcctgcctgatgctatgcttgaagatgtgatggacaggattattcaagcagatattcttctagtccttgttaaccacccatcacctgctatccagcaaggagtaattaaactgttacatgcatacattaatagagcatcaaaggagcaaaaggacaagtttctgaagaaccgtggcttttccttattagccaaccagttgtatcttcataggggaactcaggagttgttggagtgctttgttgaaatgttctttggtcgaccgattggcctggatgaagaatttgatctggaggaagtgaagcacatggaactgttccagaagtggtctgtcattcccgttctcggactaatagagacctctctctatgacaatgtcctcttgcacaatgctcttttacttcttctgcaagttttaaactcttgttccaaggtagcagacatgctactggacaatggtctactctatgtattatgtaatacagtagcagccctgaatggattagaaaagaacattcctgtgaacgaatacaaattgctcgcatgtgatatacagcagcttttcatagcagttacaattcatgcttgcagttcctcaggcacacagtattttagagtgattgaagaccttattgtacttcttggatatcttcataatagcaaaaacaagaggacacaaaatatggctttggccctgcagcttagagttctccaggctgctttggaatttataaggagcacagccaatcatgactctgaaagtccagtgcactcgccttctgcccaccgccattcagtgcctccgaagcggagaagcattgctggttctcgcaaattccctctggctcagacagagtctctgctgatgaagatgcgctcagtggccagcgatgagctacactctatgatgcagaggaggatgagccaagagcaccccagccaggcctcggaggcagagctcgctcagaggctgcagaggctcaccatcttagctgtgaacaggattatttaccaagagttgaattcagatattattgacattttgagaactccagaaaatacatcccaaagcaagacctcagtttctcagactgaaatttctgaagaagacatgcatcatgagcaaccttctgtatataatccatttcaaaaagaaatgttaacctatctgttggatggcttcaaagtgtgtattggttcaagtaaaactagcgtttctaagcagcagtggactaaaatcctggggtcttgtaaagaaaccctccgagaccagcttggaagattgctagcgcatattttgtctccaacccacactgtacaagaacggaagcagatacttgagatagttcatgaaccagctcaccaggatatacttcgtgactgtcttagcccctccccacaacatggagccaagttggttttgtatttgtcagagttgatacataatcatcaggatgagttaagtgaagaagaaatggacacagcagaactgcttatgaatgctctaaagttatgtggccacaagtgcatcccgcccagtgccccttccaaaccagagctcattaagatcatcagagaggagcaaaagaagtatgaaagtgaagagagtgtgagcaaaggctcatggcagaaaacggtgaacaacaaccagcaaagtctcttccagaggctcgatttcaaatccaaggatatatctaaaatcgctgcagacatcacccaggctgtatcactctcccaaggcattgaaaggaagaaggtgatccagcacatcagagggatgtacaaagttgacctgagtgccagcaggcactggcaggaatgcatccagcagctgacacatgacagagcagtctggtatgacccaatctactatccaacttcatggcagttggatccaacagaagggccaaaccgagagaggagacgtttgcagagatgctatctaactattcccaataagtacctcctgagggacagacagaagtcagaaggtgtgctcaggcccccactctcttacctttttgaagataaaactcattcttccttctcctctactgtcaaagacaaagctgcaagtgaatccatcagagtgaatcgaagatgtatcagtgttgcaccatctagagagacagctggggaattgttgttaggtaaatgtgggatgtactttgtggaagacaatgcctctgacgcagttgaaagctcgagcctccaaggggagttagagccggcatcattttcttggacatatgaggaaattaaagaagttcacaggcgctggtggcaactaagagataatgctgtagaaatctttttaacaaatggcagaacactcctattagcatttgacaataacaaggttcgtgatgacgtgtaccagagcatcctcacaaataacctcccaaatcttctggagtacggcaacatcaccgctctgacaaacctgtggtattctggacaaattaccaattttgaatatttgactcatttaaacaagcatgcgggccggtccttcaatgatctcatgcagtacccggtgttccccttcatcctttctgactatgttagtgagactcttgacctcaatgatccatctatctacagaaacctatctaagcctatagctgtgcagtataaagaaaaagaagaccgttacgttgacacatacaagtacttggaggaggagtatcgcaagggagctcgagaggatgaccccatgcctcctgtgcaaccctaccactatggctcccactactccaacagcggcaccgtgctccacttcctggtcaggatgccgcctttcactaaaatgtttctagcctatcaagatcagagtttcgacattccagaccgaacatttcattctacaaacacaacttggcgcctctcctcctttgagtccatgactgatgtgaaggagctgattccagagtttttctatcttcctgagttcttagtgaaccgtgaaggctttgacttcggtgttcgtcagaatggagagcgggttaaccacgtcaatcttcctccctgggcacgcaacgatcctcggctgttcatccttattcaccggcaagcactagagtctgaccatgtgtcccagaacatctgtcactggatcgacttagtgtttggctacaagcaaaaggggaaggcgtctgttcaagccatcaatgtcttccaccctgctacatattttggaatggatgtctctgcagttgaagatccagtgcagagacgggctttagaaaccatgataaaaacctacgggcagaccccacgtcagttgttccacacagcccatgccagccgacctggagccaagcttaacatcgaaggagagcttccagcagctgttggcttgttagtccagttcgctttcagagagacccgagaaccagtcaaggaagtcactcatccgagccctttgtcatggataaaaggcttgaagtggggggagtacgtaggttcccccagtgctccagtacctgtggtctgcttcagccagccccatggagaaagatttggttccctgcaggcactgcccaccagagccatctgtggtttatcacgaaacttctgtcttctgatgacctacaacaaggagcaaggtgtgagaagcatgaacaacaccaatattcagtggtctgctatcctaagctggggatatgctgacaacatcttacggttgaaaagtaagcagagtgagccaccaatcaacttcattcagagttcacagcagcaccaggtaaccagttgtgcctgggtgcctgacagttgtcagctcttcactgggagcaagtgtggtgtcatcacagcctataccaacaggctcaccagcagcacgccctcagaaattgaaatggagagtcagatgcatctctatggacacacagaggagatcaccggcttatgtgtctgcaagccgtacagcgtgatgataagcgtgagcagagacgggacctgcatagtatgggacctgaacaggctgtgctatgtacaaagtttggctggacacaaaagccctgtgacggctgtctctgccagtgaaacgtcaggtgacattgctactgtgtgtgactcagctggcgggggcagtgacctgagactctggaccgtgaatggggacctcgttggacatgtccactgcagagagatcatttgttctgtagctttctccaaccagcctgagggagtctccatcaacgtcattgctgggggattagaaaatggcattgtaaggctatggagcacatgggacttgaagcctgtgagagagattacatttcccaaatcaaataagcccatcataagcctgacattctcctgtgatggccaccatttgtacactgccaacagtgaggggacagtgatcgcatggtgccggaaggaccagcagcgtgtgaagctgcccatgttctactctttcctcagcagctacgcagctggatgaagagaaggagtgtccccacaggacataagcaccgctctgcgagcctggctccaccaactgcagaagcagatgactgagcagatatccaggaaagacaacacacgtgcctctgtgcgcgcttccccagcctccgtgggcctgagagtaaagccctgccctcattccataatggcgtggaaggctgggtctgcacacactagccaattaaagtcagaatcttgatgctttttcccaaaaggttaggctgaatcaaagatcagggtctc

SEQ ID NO: 3210 - protein, 3769 aa, Mus musculus
MSTDSNSLAREFLIDVNQLCNAVVQRAEAREEEEEETHMATLGQYLVHGRGFLLLTKLNSIIDQALTCREELLTLLLSLLPLVWKIPVQEQQATDFNLPLSSDIILTKEKNSSLQKSTQGKLYLEGSAPSGQVSAKVNLFRKIRRQRKSTYSVRDARKTQLSTSDSEGNSDEKSTVVSKHRRLHALPRFLTQSPKEGHLVAKPDPSATKEQVLSDTMSVENSREVILRQDSNGDILSEPAALSILSNMNNSPFDLCHVLLSLLEKVCKFDIALNHNSSLALSVVPTLTEFLAGFGDCCNQSDTLEGQLVSAGWTEEPVVQRMLFRTVLHLMSVDVSTAEAMPESLRKNLTELLRAALKIRACLEKQPEPFSPRQKKTLQEVQEGFVFSKYRHRALLLPELLEGVLQLLISCLQSANPFYFSQAMDLVQEFIQHQGFNLFETAVLQMEWLLSRDGVPSEAAEHLKALINSVIKIMSTVKKVKSEQLHHSMCTRKRHRRCEYSHFMQHHRDLSGLLVSAFKNQLSKSPFEETAEGDVQYPERCCCIAVCAHQCLRLLQQVSLSTTCVQILSGVHSVGICCCMDPKSVIVPLLHAFKLPALKAFQQHILNVLSKLLLDQLGGAELSPRIKKAACNICTVDSDQLAKLGETLQGTLCGAGPTSGLPSPSYRFQGILPSSGSEDLLWKWDALEAYQSFVFQEDRLHNIQIANHICNLIQKGNVVVQWKLYNYIFNPVLQRGVELVHHCQQLSIPSAQTHMCSQLKQYLPQEVLQIYLKTLPVLLKSRVIRDLFLSCNGVNQIIELNYLDGIRSHSLKAFETLIVSLGEQQKDAAVLDVDGLDIQQELPSLSVGPSLHKQQASSDSPCSLRKFYASLREPDPKKRKTIHQDVHINTINLFLCVAFLCVSKEADSDRESANESEDTSGYDSTASEPLSHMLPCLSLENVVLPSPECLHHAADIWSMCRWIYMLNSVFQKQFHRLGGFQVCHELIFMIIQKLFRSHTEDQGRRQGEMSRNENQELIRISYPELTLKGDVSSATAPDLGFLRKSADSVRGFQSQPVLPTSAEQIVATESVPGERKAFMSQQSETSLQSIRLLESLLAICLHSARACQQKMELELPSQGLSVENILCELREHLSQSKVAETELAKPLFDALLRVGNHSADLGPGDAVTEKSHPSEEELLSQPGDFSEEAEDSQCCSLKLLGEEEGYEADSESNPEDVDTQDDGVELNPEAEGFSGSIVSNNLLENLTHGEIIYPEICMLQLLSASKAKLDVLAHVFESFLKIVRQKEKNISLLIQQGTVKILLGGFLNILTQTNSDFQACQRVLVDLLVSLMSSRTCSEDLTLLLRIFLEKSPCTEILLLGIHKIVESDFTMSPSQCLTFPFLHTPSLSNGVLSQKPPGILNSKALGLLRRARISRGKKEADRESFPYRLLSSWHIAPIHLPLLGQNCWPHLSEGFSVSLWFNVEYIHESESAAERGKRVKKRNKPSVLEDSSFEGAEGDRPEVTESINPGDRLIEDGCIHLISLGSKALMIQVWADPHSGTFIFRVCMDSNDDTKAVSLAQVESQENIFFPSKWQHLVLTYIQHPQGKKNVHGEISIWVSGQRKTDVILDFVLPRKTSLSSDSNKTFCMIGHCLTSQEESLQLAGKWDLGNLLLFNGAKIGSQEAFFLYACGPNYTSIMPCKYGQPVIDYSKYINKDILRCDEIRDLFMTKKEVDVGLLIESLSVVYTTCCPAQYTIYEPVIRLKGQVKTQPSQRPFSSKEAQSILLEPSQLKGLQPTECKAIQGILHEIGGAGTFVFLFARVVELSSCEETQALRVILSLIKYSQQRTQELENCNGLSMIHQVLVKQKCIVGFHILKTLLEGCCGEEVIHVSEHGEFKLDVESHAIIQDVKLLQELLLDWKIWNKAEQGVWETLLAALEVLIRVEHHQQQFNIKQLLNAHVVHHFLLTCQVLQEHREGQLTSMPREVCRSFVKIIAEVLGSPPDLELLTVIFNFLLAVHPPTNTYVCHNPTNFYFSLHIDGKIFQEKVQSLAYLRHSSSGGQAFPSPGFLVISPSAFTAAPPEGTSSSNIVPQRMAAQMVRSRSLPAFPTYLPLIRAQKLAASLGFSVDKLQNIADANPEKQNLLGRPYALKTSKEEAFISSCESAKTVCEMEALLGAHASANGVSRGSPRFPRARVDHKDVGTEPRSDDDSPGDESYPRRPDNLKGLASFQRSQSTVASLGLAFPSQNGSAVASRWPSLVDRNADDWENFTFSPAYEASYNRATSTHSVIEDCLIPICCGELLSGVLLVLPDAMLEDVMDRIIQADILLVLVNHPSPAIQQGVIKLLHAYINRASKEQKDKFLKNRGFSLLANQLYLHRGTQELLECFVEMFFGRPIGLDEEFDLEEVKHMELFQKWSVIPVLGLIETSLYDNVLLHNALLLLLQVLNSCSKVADMLLDNGLLYVLCNTVAALNGLEKNIPVNEYKLLACDIQQLFIAVTIHACSSSGTQYFRVIEDLIVLLGYLHNSKNKRTQNMALQLRVLQAALEFIRSTANHDSESPVHSPSAHRHSVPPKRRSIAGSRKFPLAQTESLLMKMRSVASDELHSMMQRRMSQEHPSQASEAELAQRLQRLTILAVNRIIYQELNSDIIDILRTPENTSQSKTSVSQTEISEEDMHHEQPSVYNPFQKEMLTYLLDGFKVCIGSSKTSVSKQQWTKILGSCKETLRDQLGRLLAHILSPTHTVQERKQIIVHEPAHQDILRDCLSPSPQHGAKLVLYLSELIHNHQDELSEEEMDTAELLMNALKLCGHKCIPPSAPSKPELIKIIREEQKKYESEESVSKGSWQKTVNNNQQSLFQRLDFKSKDISKIAADITQAVSLSQGIERKKVIQHIRGMYKVDLSASRHWQECIQQLTHDRAVWYDPIYYPTSWQLDPTEGPNRERRRLQRCYLTIPNKYLLRDRQKSEGVLRPPLSYLFEDKTHSSFSSTVKDKAASESIRVNRRCISVAPSRETAGELLLGKCGMYFVEDNASDAVESSSLQGELEPASFSWTYEEIKEVHRRWWQLRDNAVEIFLTNGRTLLLAFDNNKVRDDVYQSILTNNLPNLLEYGNITALTNLWYSGQITNFEYLTHLNKHAGRSFNDLMQYPVFPFILSDYVSETLDLNDPSIYRNLSKPIAVQYKEKEDRYVDTYKYLEEEYRKGAREDDPMPPVQPYHYGSHYSNSGTVLHFLVRMPPFTKMFLAYQDQSFDIPDRTFHSTNTTWRLSSFESMTDVKELIPEFFYLPEFLVNREGFDFGVRQNGERVNHVNLPPWARNDPRLFILIHRQALESDHVSQNICHWIDLVFGYKQKGKASVQAINVFHPATYFGMDVSAVEDPVQRRALETMIKTYGQTPRQLFHTAHASRPGAKLNIEGELPAAVGLLVQFAFRETREPVKEVTHPSPLSWIKGLKWGEYVGSPSAPVPVVCFSQPHGERFGSLQALPTRAICGLSRNFCLLMTYNKEQGVRSMNNTNIQWSAILSWGYADNILRLKSKQSEPPINFIQSSQQHQVTSCAWVPDSCQLFTGSKCGVITAYTNRLTSSTPSEIEMESQMHLYGHTEEITGLCVCKPYSVMISVSRDGTCIVWDLNRLCYVQSLAGHKSPVTAVSASETSGDIATVCDSAGGGSDLRLWTVNGDLVGHVHCREIICSVAFSNQPEGVSINVIAGGLENGIVRLWSTWDLKPVREITFPKSNKPIISLTFSCDGHHLYTANSEGTVIAWCRKDQQRVKLPMFYSFLSSYAAG

SEQ ID NO: 3211 - DNA, 242678 bp, Homo sapiens
tgcatatgcccactttcctctccagcttaatgaatatcaatgattgcagcctcttagcaataaaggagtgtcacttctcattcacagatgaggaaattgaggcccactatcaaatagatggttacggcggaactggagcaaaattcaggtcttcagcctcccagtccgtgactctttggagcgcacataactacgtaaaatgagaaactttgtttctacttggaaacataaacaatgataatcctaattgttattaaaactgtgaaatgtttttttttttcccaagacagtagggctgcatgacttagttttatgttataaaatcatgatattgtaccctaagataatgatccttctttgagacatgattcaggtgtctctgcaggaactaatttcacaatccagtatacttcataggaatttcggaagaaattaggtaaattagctgagaaaacaagaacttatcacctccaatattgacttaagcgctaataacacaagtaaccttaccttatagagctgtgggacttcaaaagcagaagtgaggtcacagaagagcttggtctaaacttgtcccctccttccccattcctacttctgcttctgtggatattcctcttttttggtaattttagagaaaaaaaaacaaaaaacaaaaaacaaacatgaagactcacatccagagccttcctacctccgaatgtagcattcactgcgctgagagcttttccccaggaagttgggctttgctctcacctggtcacctttcaggaatcccaaaaatacagggtctgttttccctgcaaaagaacagtatgtgcaggtcaaaggacaacagataggcctatttattttcccagagaccttggccaggccctagtgtcttctcttcccttgtcctcaggttgtgggtcagcctcaggtcatgggtcaggtcgggcttgcacagccctgatcaggtcccagggcttccctccccaccctccctggtgggttttctaggcttcttctttgagagcctctatgaacctctgtcctcccagttacctttataaatagacaatggggaaaaacaaatatttcaataaatagttgaataaggtctcagagctgttgcccttctaatgactgttagatactagaaaatacctcaaatttcagagctctgggccatcccctgtcctagagctgggccccctagggtagcgttgtggtctgggtacacaccttgaatgctgagtaaatacagaactttctgggcttctggtgagaactcttagaacacgctatatggcacgaatattttctctcctagagaagacggccgagccctgggactcttgtctgctgacccagactgtaacagagcctgacaactcacagaggtctttttttgtcctcaagctcagagaacttcagggccagctgccttcgtttgggtgagagggtggtgcacagcttagggaaggctgagcaacaggagctgcagggagggtgtggcctcctttgtggggtcaacagtgggcctaagtctgggctgggtagttggtgagagtgaaactgggttgattgggagagggacttatggcagtgcccctgtctgaaagaggagcagggtctctcggaagacccataatcctgatccctcactgaaacccaaacgccttgagaaatcctctgcattgctcatgactgacatttagtatagtaatagttgtgttaggccctttgaatgataaacaccacattctggataaggatgatctctaggaagaggccatgggagaaacatatcaatgaagtctcatatccataatgttgtcattttaaatgcaagtcttattttgggataatttatggaaaaattgcaaatgtagtccaaagagttcccatataccccttcgtcccattccccccagtgttgacatcttacataaccatggtacagaaatgaacataactcagaaattaacactggtacaactaaacgttagattttattcagatttcaccagttttttcacaaacgccctttttccatttcaggatccaatccaggactcgacattacacttagcacacctatattgttttatatgtttgaaaagtttgaaaaaatgttggcaaggccgggcgcggtggctcacgcctgtaatcccagcactttgggaggccgaggcgggtggatcatgaggtcaggagatcgagaccatcctggctaacaaggtgaaaccccgtctctactaaaaatacaaaaaattagccgggcgcggtggcgggcgcctgtagtcccagctactcgggaggctgaggcaggagaatggcgtgaacccgggaggcggagcttgcagtgagccgagattgcgccactgcagtccgcagtccggcctgggcgacagagcgagactccgtctcaaaaaaaaaaaaaaaaagaaaaaaaaagaaaaagaaaaaatgttggcaaactttctggcaagaacagaaacttcattatattgctttctggccattattggagggaacatagtgcttatgagggaggctctggagataagacaagcaatccagcttcaaattctggctcaagcactctctagctgtgtgcttaatctctctgagcctaaatttcctcaactcaaaaatagggatgataacagtatgtaccacttaggcttactctgagatttacatggattaagtcacacaaggcaactagaaattgtgatcaagaaatgttagctattattattaattgcatatgtaattcacaacacaatttttctaaaaatagctcctttgagagtctctggagtccatcttaataagaaatcacaaccttcattgtaaatctgttccccattacaaaatttgctacattgtattgtaactatgtgcttctgtatctgtctttaacagtattgtaactatttgtttctgtatttgtttttaacaatattgtaagtatttgtttctatatctgtctttaacaatgaactgcactttgcacagcaaggcacatacaagaggaaagtgtgtttagtatgaaggaagaaagaaaacatggaaagtggttcggtatctcctccagatgctctaatgggggactcagggccagagtggggcacagcatttgttcagatcaagggagctgcatttttcagggcaaagatttagcagggatgaaaagatgaaataacagtgtagagagagctacaagcactgagcagaggggcagggggtaagtgggtctagatgcaaagaaaacgctttctgtccttaagagcatgcacagtacaggagcctggaagaacttttcatcccggggctgcactgaaaagtccactgaactcaactgggacaatggctgcagtcagctttcatccttgatgctgagtaccgagcaatccctcccacacttcacttttttatttatttatttatttatttatttatttatttatttatttatttatcacttgattgagatagagtctcactctgtcgcccaggctggagtgcagtgtcccgatctcggctcactgcaacctccgcctcctgcgttcaagtgattctcctgcctcagcctcccacatagctgggcttacaggcatgcaccaccatgcctggctaatttttgcatttttagtagagacggggtttcatcatgctggccaggctggtctcgaactcctgacctcaggtgatcctcccaccttggcctcccaaagtgctgggatcacaggcctgagccaccacgtccagccttttatttatttttttgaaacaaggtctcactctgttgcccaggatggagtgcagcggtgtgccatcacggctcactgtagcttcgacctccccaggctcaggtgatcctcccacctcaccctcccaagtagctggaactgcaggcatgggctaccacaccaggctaatttttgtacttttttgtaaagacagggtttcaccaagttgcccaggctagtgtcaaactcctgggctcaagcattctgcctgcctcgaccttccaaagtgctgggattacaggtgtgagccactggaggggaaccaccccatcttttttttttttttttttttttttttttgctgtttgttgttgttgttgtttgtttgcttttctgttttgagccagagttttgccctgtcactcaggctggagtgcaatggagcagttttggctcactgcaacctctgcctcctaggatcaagtgattctcccatctcagcctaccgagtaactggaattacaggtgcccgccaccatgcctggctaatggttgtatttttagtagagacagggcttcatgatgttggccaggctggtcttgaactcctgacctcaggtgatccaaccgcctcggcctcccaaagtgttgggattacaggcgtgaaccaccgcgcccagcctttttttgttgttgttttgtgagatggagtctcgctctgttgcccaggctgaagtgcaatggtgcaatctcagctcactgcaacctctgcctcccgggtaaaagcaattctcctgtctcagcctcccgagtagctgggattacaggcacacaccaccatgcccagctaatttttgtatttttaatagagacggggttttaccatgttggtcaggctggtctcaaactcctgacctcaggtgatccacctgccttggcctcccaaagtgctgggattacaggtgtgagccaccgcacctggtcacaatgtaaccatttttaagtgcacagttcggtgtcattaagtatattcacattcttgtgcaaacctcaccactatccatctccagactttctcctcttcccaaacggaaactttgtacccactaaacaactccccatccccttctcccagcagcccctggcaaccaccattctacttcctgtctctattaatttgactcctccaggtacctcatataagtataatcatacaatattcatccttttgtgacaggcatgttttacttatcataacatcctcagtgtttattcatgttgcagcatgtctcagaatctcttctctttttaaggttggataatattctatgatatggatacctcacattttgttatattaatccattgagggacactggggttgcttccaccttttgactactgtgaataacgctgctttagacattagtgtacaagtatctatttgagattctactttcgattcttttgagtacatacccagaagtggaattactggatcatatggtaattctatgtttaactttctaaggaatggcctttttatagcaagaaagggttctagggtgtggggggtggtgaggaggagggatggtagttccgagaatcgagattacttcaacattcgtaagaacctcaaggatggtaggttggagggatctgaaagttagtgtagcacagctgccttctaacacctacagactcacttctgtgcggcttccttctagggctgaaatgctctgaggtctccctgtgctgcctttacctctcgtggccacagagataacatgaatctgtctgctttgtgacagccctcaggcctcggaagacagctttcttgtctccctgtcttttgtcttctagagaaagctttgggctttaatttttttttttttttttttttttttttggtagagacaaggtcttgctatgttgcccaggctggtctcaaactcaaggcctcaagtgattctcctgcttaagccttccaaagtgctgagattactggcatgagccaccatggccagcctgctgttttttaactgttcctcctatgactcagttttaagactccttatcctaggtactctctgaaggagttaatttctgtacaatacttataagagtggtactctaagcggaatgaaatacccctggcaaagtccaagcagcatggcctagagagagtttatcacttcctttattctaaagcggggcatcaaatgactgcttgggcagggcagggaacagaaaggtgcaagtcaggcctctatgagacagctgggattggtaaaacccagggttaaatgggaagcatgttggcttgcaaaggtatttacctggacaacaacagcagccccaaccaaagagaggatttaccctaagaagaaaccatccagcccactgtttcctttattttttgataggtaggtaaaaggtggatgaaggactgcaaccatcacaatgtggcctcatatggagcttgctttcaactaaaaccctgaacaccttttcccacaagtgctgcaaaatacctcccacctattctttactcaaaccattgatgttttcgactcaacggcagggcctgacatggcactgacctctactaaatgccatgttagaatgatctcatctctttaacccttcaagacttgtctagtcttattctgccatcctgtgtatttagtccatctcccaactttatatcttagcttgtcaatgcttcttagcaatgatgaaggaattttaggagcttaattgactttttcagtcctctccataaattagtgtggtatgtaccacctcagctggacagttgctcttatatctttcatattgagctgatttctgaactctcccaaacagccaagcatagaatgaagccttgtgaaggatcacaacttgaagtctgtcttccacttcacaacttcccataacttctgacatatttttaatatgccattctctcttctctaataagaatggcagacaccctgtgagtaggctataatatttaatgagttactatgtttgcctgtggatatttttaaaggaatacagtaactctttaggagacaaatgcttttttcctccttgaatagaatgccaagtaaaatttgggtaaatttataaatatttcttttttttttttttgagatggagtttcactcttgttgcccaggcttgagtgcaatggcacgatctccactcactgcaacctccacctcccaggttcaagcaattctcctgcctcagcctccagagtagctggaattataggcatgcgccacagcgcccggctaattttgtatttttagtagagacgggggtttctccatgttggtcaggctggtcttgaactcccaacctcaggtgatccacccacctcggcctcccaaagtgctgggattacaggcgtgagccactgcacctggcctataaatgtttctttaacaaataaacatggtgggggcagtcagacctatattatccaccttatttttctttttgccttgattaccagcaatctaggccaaattcagagcccagataattggctcatctcaggcaatttgttatattcaccccatttacagagcccctagtgtattttttatcttaaattaccctagttttggaatcggtatcaactttctcaagccagttagtatcactctgcacatcacaagaatatttaagtaaacggtagccactcagaaaggatttctgtcttccaaatgaatcatttgcatcctgctcattaacaagggcctctaagttcataataaggccaagatatatttttttccaaaacgtcttcaagaggaaaatattaattcagtacatcaagttatgataggtgatctaacaacattagtagaattaaatgaggcaggaagtgccatgagaaatgcaagtaacacttagagaggtaaagccttcacagctcttcaaaatgcttcaggggctttttaataatatgtgttacagcacgaaacagagctaacccacatttcaaaggaaagaaggcctttttctcctaaaggtatatgttcacagtgactttattatccacagcattcagccagttttcatgttggatagataaagaactttctctcaatacctttgacccttaacatctctgctgggtgtgagttaaactcagctgatgtgagaacagtaaatatagtcaaacccacactctttacattgagtgcagctgggggaattcatcgacatggcctaaacagtgataaaaagggactgcaataatgatgtattgaagaaatatttatcaagaacctaatacctacatggtacctaagatactagaatacatttataaatatttgttgaggaactaattataaagactattccaggtgctttagggttcagccacaacctattataagtaatacctattataagtgggtgcttgtaatagatattaccatattatctaagcactcactttaatactcattgttctgggctccacctgatattatgatatgaatctttttagctatactctgatccagaagatcacatgattagcatcaatttctaaggacagtaataaacttgatagttctgagcaaatacatacactacagaatagtcattcaacaaatatttattgcctgcctactatgtagtctatatatacctatatgtaacacacatgcaaagaacagtctagttagtagtttagaaggaaggaattggatgttaaacgggcctgggttcaagcactggtgccaccctttaaaagcagtgaaacattgaacaagtcttagattccttatcagtaaaatgggaataaaagtacctatctggaagaattgttgtgaggattacatacaataacactgatgaaatactagcccaggacctggcataattgccaatttaaaaagagcaacttggcaaagtgctagttgggaggccaaggcgggaggattgcttgagcctgggagttcaagaccagcctgggagaaatagcaagaccctgccactaaaaaataaaaataattagctaggcatggtggtgttttcctgtaatcccagctactcaggaggctgaggcaggaggatcacctgagcccaggcgtttgaggctgcagtgagctaaggtcacacaactgcgctctggcctgggcttcagagcaagaccctgtctcaaatgaaaaaaaaaaaaaaatgccattgtttatatatatatgtacaaaagtttctaaataaaaatattaattcagaaatccataacagacatattaaaaagatgacagtagtttttaattaaaatattttaaaggtaacaacaggaggaggaaaaaaaaaaggcatattttagcacaaaggaacggcaaaaaaaaaaaaaaaagacactaggagtttggtgaaagtttgccaccagaaagctagtggcagtatccatgcttcaaactcatattgtgggccaggtgcagtgattcatgtctgtaaaccatggctttgggagactgaggcaagaggattgcctgaggccaggagttcaagaccagcctgggcattaaaaaattagctgggcgccgggcgcagtggctcacgcctgtaatcccagcactttgggaggccgaggcgggcggatcacgaggtcaggagatcgagaccatcccggctaaaacggtgaaaccccgtctctactaaaaatacaaaaaaattagccgggcgtagtggcgggcgcctgtagtcccagctactcgggaggctgaggcaggagaatggcgtgaacccgggaggcggagcttgcagtgagccgagatcccgccactgcactccagcctgggcgacagagcgagactccgtctcaaaaaaaaaaaaaaaaaattagctgggcatggtggctcatgcctgtagtcccagctacttgggaggctgaggcaggaggatctcttgagcccaggaggtctaggctgcagtgagccatgattgtgccactgcattctggcctggatgacagagcgaaaccttgtctctgaaaaaagaactcagattttggggtttagttttatgtcctccaaggactgcagacttctcaaaccaagagtaatgatggtcctcacaaggacaaacttaggtccaccctctctgcagaagaatcagggaattatgactcataggagccaccacaaaatcactaactggaaatccttgctgcagctacactgcaaaagaatcggacttgatttgccaaattccccatgtgatacaagcgtggccacctgccaaagagccagagggagagagggccactcgccttcctggtgacacagagatttcctagccccgttaccaaacgaaaaagcaacgcaagggcttctaagaagccatcccaatgaccttttggctttgagaagagcagtcctcataccagagtgtttggggttttggcctctttcagtgtttattcattcttacgtgggaaagttgtattccgaggtttctgtggtgcatgaagcttttgccttcaccatctgttcccgtgtcttcctcgggtgacatcagagtacagcagtattttcccttgccatctaatggggtttgggctgtttgactcaaccgtgtgtgttcctcaatgccaggggaataatcctaccctaagtcagctgaacagaagccaggatctaactgcaaacaagagacccagcttgcttaacagcatggaagagaccagtttcgttgcagctacctgggaagacggttgctaattagcctgcaacaaagagttccttgctcatctaaaagaggcaatcaccgttcaggtaggttaaagtgtttctgagacttttcagtgccagccgagagcatgggcagcttaggagggcaggctgggtgcagactgagagctttaagtaccaccgagaaaggtggctggtggatgaatttctggcagtgctgttgcctccaggagctggcccctgcagactgcttgctcagagagtggccaggactgtagagaaaccgcagggaagagtatttgaggagggagaatacagatacttttctggagtggggtgagccaaagacattcattggagagattccaatctgattctcgggtgccagtaaaattgagattatttgtctgggtcatggcgtagttataaggactcactcaatacatgtgtgcagatggactcatgtgggatgtttttacacaaggcacatgaaactgaacatctccaacatggacttattctttctctccttctcactcctcactgctagccctccctaacccttcagcctctgttatatttctgatctatgctaaggctatctcacatcgttagcttccactcaccacctcttgtaggttcctacacactcttaacacctttctccatttccaataccctcagctggggccctcatcatctttctcttgggctactgcaagagtctcctcaccattgtctctgcctctagtccctttcacctccaatcctctcttcaggcaactgcccacattctctttctgaaatgcaagcttgggcatatatccagcttaatggactccagtagctgcccagtacctatggaataaagtccaaagcttccgcatggcacacaggagctttcaagatcggctccctctgccattgcagcttcatcacctgcaagagtccaggactgtcatcacctggattacctgctgttctcctaatatgaccttggaattgcctccttacttcctatgctattccctcagcctggaatatctttctcttgtcctgcctgccaaactcctcctcttttttcaagacaaagccatctcctttgtgaagccttcccgatcctccttcctccagatctgggttaagtattctgcctcctatttgtgtgtgtgtgtgtgtgtgtgtgtgtgtgaaagaaagagtgtgtgtgtgtatgtgtgagtgtgtgtgtttaaatatacataacataaaatttatcgtcttacccatttttaaatgtacagtttagtggcattaactgtacattcacattcttgtgtaaccaccaccactatccatttctaggacattttaaacttccccagctgaaattttgtacccattgaacactaactcctcatttccttctatcccccagcttctggcgaccaccattctgtttcctgtctgtgcgaatttggctattctacatacatgatatatataggatttgtccttttgtgagaggcttttttcactcagcagcataccttcaagattcatccatgttgtagcatgtgtcagaatttcttttctttttaaggttgaataatattccattgcatatatatatgtatgtacgtgtatgtaaatatatatacacacacacagtgatatatataatatatcacattttctttattcatctatcaatggacacttgcattgcttcccctttggcttttatgaataatgctgctatgaacatgggtgtaccaatatctctttgagatcctgctttcgctctttgatatgtaccggaagtggaattgttggatggtatggtaattcacacccctattatttttcctcaaagctgattgtgcatgttaaatatgcatcttcaatgtggtaatgtagctatatacaaacttccaaggagtaattttaggtaattaaagcacagcaaagactctgcaaagaacatctgactcttccctgtggtaaaagtatgttttccacacagaagaacttgcaaacctgttgaaacgtgacagtgtgaataacacttgcagtctaaaattaaactctggcaaaatacttctaaggagaaaattcttttaagataaccagttggtaagttttgtagttaccacttcgttatgacctgcttagaaatttggagttaggaaccccagttccagccctgccctgtatatcacgtacagcaagtcacttaatttcctaggctgattctcctgcttcagcctcctgagtagctgggattacatgcaccctccaccacgcccggctaatttttttattttttgtagagatggggtttcaccatgttggttaggctggtcttgaactccggacctctggcgatccacccacctcagcctcccaaagtgctgggattacaggtgtgagccaccgtgcccggccgctaaatggaattctttaaaggaaaaaatgcagcaatacttgttcttcccatttgcgtaagaaaaatctttgaagatgaagtagaatcctagggacatttaagggtgacaagataggttctggtgggattttaaaacatcacaattgaggagacagttttccataaataaggaataggcacagagaaggaaagccctgaaccaagaatagaaaaaatactcttggtaaaaacagacagtaagtcctacatggtatgtatacattccatctaggcagtatcagttatagcattagaataaataccctaacccacttcccatggttctttctggtttgctgtacatattaggtgtggcaaagatgtgtttagtcactgttatgacggtgtcaaatgatgacacttttaccgagtaataaatcaacgcaggatccttgacttagaataactgaccaatcaacttacttgtacatcttacaacctccattcttaccatgcatgttttcagaatgtctatgctattgattctccacaagggaaggcagtataaggcaagcctgctgagtttttttcacatatattgctaaactaatattgagtgagatatagtcttccttcttctctgaaattgaggaagtggtcaatacaaaaagaaacatgtttgagacaattatagaattcagatgacctaaccaatgacttgtaaatacaagacataaaaggtacagtgctatgaatgtagttgctgataactctaagaaaaaacgagacaagagttcactcttctgagaaacttagatccattctcagtctgggcatggtggctcacacctgtaatcccagcactttgggaggctgaggtgggcagatcacctgaggtcaggagttcgagatcaccctggctaacatggtgaaaccccgtctctactaaaaatacagaaattagctgggcgtggtggcgcatgcccataatcccagctacttgggaggctaaggcaggagaatgacttgaaaccgggaggcagaggttgcagtgagccaaaattgtgccactgcactccagcctgggcgacagagcgagactccgtctcaaaaaaaaaaaaaagaaagaaaggaaggaagttagatccattctcagagctttcagtttatagttccatatttctctgttttagaatgctcagaaacagcctgaaaagctgaaagggagttagtatgtaataaaagtggcatttctaattagaggggaaaagatgagtataatgaatggtgttaaaggaacagactatgtatctggagtaaaatatttttccctgttctctttcccttcaaacagtgtcctccacacatgttgtcaggtgtctggttagacagccagttaacacaggtagcacctggggtgccactcagcagttcttgaggtgaatattgttagcaggcgaccattcccgccatatgctccctgcttttgcaaaaccagtccccagtggccaaagatttgtcttgctttcagacatctattatatgcctgccttcaactggtcagaattcacacccatacctgcaaatgtattctccccagtgacaaatgctctaatattatttctgtgtattaacagtcagccacaagtgggtaggatactcacctcatagttgtcttcaatgtgtgaagaatggctggtagtggtggttcacacctgtaatcccagtgctttgggaggctgaggtgggaggattgcttgagcccaggggtttgaggttacagtgagctatgattgcacacagaactccagacagggctatagaacaagatcctgtctcttaaaaaatgtgttacctgttgggtacaatgttcactattcaggtgatgggtactctaacagcccagacctcaccactactcaatatatccatgtaatacaattgcacttgcacccctaaatctgtaaaaaaaaaatttaaatactaatgtgcaaagaactgtgttcattagattgcctgagcccagcatggtgggtggcaagcatgggttaaaagccaggtttccaacaattagcaaaggcacagctgccagtaaatatggtgttgtctgtatcccatcaggaaacccttgctctcctattagacctaattatcagtcagcagctgagttccaaaaatggtgctatgggtttggcaggaaacaagtcaggagaggttatcctgctgggtgagaggtcctgtgatggtgctttacaatacatttcctggtcagctattactgtgatttggtgacctcaaaatcttggctggtgcttttaggtctggaggaggaacttgggcagtaggaaccacaatggcggaagcagggcggccgtcattatttttacttcaggttgctagtatctgactattagggaacatgtgtccaagggggtggaatcagggagagtgggatagaagggagagtatcttcttgaaatcacatagaattcaggagaagctgagttcaatggcagcttgcacactggtcacagagtccacccgcagagccagagttgctctgccacaagccactccctcatcactcagggtgggaatgcaacttgccaagactgcctcctggcctggagtccccctccagctgaaggccgagctcacctgctccagggatgttgccttggggctctgctgattaagctaccctaccttgccaacacgtgtgaagtgacaggatgatttttaaaactataaagatccagaagattacattattaagtgggcccagacatgtttaaatgcattgcatatttgaggccctttccaattcaaaggtgctttgatacatcttatctgagtcaactgtcttcctcagttagatttctagaatctagtaacaccctgttgccctgtcttcttgatattatatttcagtgattggtttgccaacctaatgtctgcatttgctccaatatcaatgtgtgttttagatttttttttttttttttttttggtggcagatattgtcagatacttccaaatagatcatacattttatttcccataagatgacccacctgggctacatctacactgctaagcgatacaattgtctcagaactgtactcacggaatagaaacgtttaaaaaagaaagttgaccggccaggcgcggtggctcacgcttgtaatcctagcactttgggaggccaaggcgggtcgatcacctgaggttgggagttcgagaccagcctgaccaacatggagaaaccccatgtctactaaaaatacaaaattagccggatgtggtggtgcatgcctgtaatcccagctactcgggaggcagaggcaggagaattgcttgaacccgggaggcggaggttgcagtgagggagatcgtgtcattgcactccagcctgggcgacaagagcaaaaccccgtctccaaaaacaacaacaacaaagttgaccataagtgaactgtttacaaaatgaattctgtgttcccatgattcctatatttcctcctctgatgtcagcacaatctgggcagggagaaggatttttcttccatcagaggctccagcaaacacctggtagagtgagtgacccctctctgtcatggctggtgtgtggtgctggcccctcttgatagcgggacagggccagccattctcttttctctggtacaaccactcggttatatggatagcatgtcagtgctgacttcaaccagggatcccacagacattttagggaaaacaagcctttctgttttaaatctcagatgcttttgtccaggactggacatagaaatatctagaaaacaggtaaggagcaaatctggatgccagaccctctgctgtgcttacagtcacctgttccattctgcaacccaacttttattatcagataagcttttgtacctgggaaggtctgaatgagagctcttcagtcactcctctgaaccaatgcctggggctgccccaccaggacccgtataactcgtaccatctaaattctagtcataaacatagcttaggcttaaagtggaccatgctacactaatattcagttctgattccaaatatatgacaggactgtgcctctcaaattagcttatgtagtgagctgggcaaatgattatgtcatttttacaagtttagtttctctttgcagaaaacagaactttactaacaaacaggatgtcacatcatagggcacatagatgtcaaatattccgatctgccaggaacaaaaaatcagaatttaaataaaatctccccaagtatgataataagctctagcaactgtcagccatgtggctacagatcatagagaattcattcaactatttatattcttctgtgtcatcagcttcctcgtttatccaaaaaattaattgagcaactactaccttggttacttgggaacacaaaaagtcaaaatgcagttcccacaacttagtaaactcaaagtgtatttgagaagacaaaccattttttttaaagaaaataacaatagaaatactgtgggaagcaggagagggagggaaaactatattggattgtgttttgtttttttggccatgtgggatgttctttcccttttagcagataaaaaagaaaatgtattttctttttttcttgagacagagtcccactctgtcacccaggatggagtgcggtgacatgatctcggctcactgcaacctctccctcccaggttcaagtgatcctctcacctcagcctcctgagtagctgggactataggagctgccaccatgcctggctaatttttgtatttttagtagagatggggtttcaccatgttggccaggctggtctcaaactactgagtggttctagtgaaccacctgcctcagcctcccaaagtgctgggattacaagcacgagtcactatgcccggccaagaaaaagcatattttaatttaaatcttaactcataaataaggaaagatcatgcctttagtacattcaatgcagtttgtttgtttttgtttgtctgtttgtttgaaacagagtctcgctctgtcacccaggcttgagtaccatacctcactgcaagcctcaaactcctgggctcaagccatcctcctgcctcaggcttccaagtagctgggaccacaggcgtgtgtcaccatgcctggctaattttttacttttgtagagatagggtcttgccatgttgcccaggctgtagcacagttcttatgcaggtgtaggatgaagactaatttagacaaccaagcagttgtgtggggcaggactccttccatcagcatgatgtagctgccccctggcttagggtaaatttttatcctttggtgtctggtccttattaaaacagactctccaccagccactctggagagtcagaatattgtgttattatagttatgaaatgcttaatcagcatccctgtaattgccacacaatagccccaagatatttgtcccaggatatttaacatgtgctttgaggtttttcaataagtgattggacattttaagcaacatggaacatgccttagttaaaaatgaaaggaggaaatagggaatagtgatctatgcagctacagtgggagcagaagtaaaacacaaatcatcttcctccacccacctgcctgccttcccagcatcattctcagcctccctgaattgtggcattgactctttcactttggaaaagatcttcaaaccaccgtgatctttcccaccagtctttatacccgctgttccctctattctaggaatggagggaacaaaatatactttaatgtacatataaatcacccggggatcgtgttaaaatgctaagcctgactcagtaagtctggggcatggcctgagattctgcatttctctcaagctcccaggtaatgctgatgctgctggttggaggaggagcctgggcttggaacacccttgctgtccatcccagctcagctgtcagttgtttctggacacacggattttatgcacacacatctatgcacacacacgcccatacaaataacaaccatatcaacaacaccaacaaaacaacaaaccctttcagggaccaatcaaatttccaactctttattgtcaactgattggtccagaaaggctatttgagacatccaaactgttatttctgtatcataaaaggaagattatttaaattctccaaaagtaggaagggcttagtttcagaataaaggacagtcctttggataaaattagctttatgaaaaaaatgttttctgcattactcttattttaaaaaatttatcttagactggaggtgcttaaaatattaggaaaaactggcctgctcaaagcctgctgagtgtttaagtctcaagtttagaggctgctttccaagaagctttttatgatcccaggatgggagttgggtgtccctccgcgctgctccagagaatcctacgcacaatgttgccataaccttcatctccctcgactatagttgcttgtttacttgtctggagtccaagcagacccagaatgtctttcattccaaagccttgaacattgcaagtatacagaaaatacccaataactgaatgaaggtctgaaataacagatcaatcctgcaatcttactactgtagtggattctgtgtgtgggactaggtagagttggagacatttttttgaaatggtgcaaaattgtggtgtttatagaatggtaaactgtaaatattcagaatctttttatgtagcaccatttttcaaggaggcagcgaaacacacatatatatttttacctgttccttaccttgaccctgagtcacccttttcaactgttgctttgaagtggtcaagtgttattctattctatgcatctgctgagaacttatattatttgtgtttttctatttccttctgaatgagagaccatgagttttagcgagtccttgtaatttttaatctgctcagataaactgggctcttggctttataaacaggaatgaataggaaacctgtatttcaaatgataatgtttcttaatttccttgtacttcttagcctgtctattgtgtaggacagatttagtttgctcttccaaaataaacagctagtgtggtttcaggtgaaagttaatcagaaatttgtagaccgcaggaatatattgggaattaagatagacaaatactggctgtcaaaataagtaatgccaagtaaatcacctggctaagaattatgctcaataatagacccaaatctctcttttttcaatgatagtggtggtgatagtaataataatgcaataataaccacaactatgtgtgtttgtgtgtgtgtctactaaaacacctgtgggcatgtctgtcaattactaatgattatctctagggtgagatcatggaatacttccatttcctacgttgtatattgtgtatttgtctagtgtttgagtttattactatagcatatgttttctgttgtaagcagaaaaacaggacagaattgttaaatggaaaaaaaaacttgtatgagaattaatgacactgttgcccacaagtacagtcttttctatatatgaaagtagaacactatgacacgttcagcctgaggtttccacaggagaggggaaatttcagttgtttttaacacttttagttggttggaaaggtcatctcaaggaaatagtttctgatgtttatgtcaggactcaacacaataccccaaagtttggtgccttggcatgctgagtgctttgaacaaactgcaggaaaccaagagagcctcagaagcaagatctgtttcaccttctctcaccctcctttctcctgcttctctttctccttcaagataggccgtggaaactctaaggcaagccatagaaagtagaactcctccaccacaaagcaagtcataaacctggaaatattattctttttcttcccaactttctttttgctttttgagacagagtctcactctgtcacccaggctggagtgcgatggtgggatctcggcttactgcaacctccacctcccaggttcaagcgattctcctgcctaagcctcctgagtagctgggactacaggcatgcaccaccacacccggctaattttttgtatttttagtagagatggggtttcaccatgttggccaggctggtctcgaactcctgaactcaagtgaactgtccacctctcaaagagctgggattacaggtatgagccactctttctgcccaactttctgaatagaagctggccataaaaaaattctctgacctcccctgttggatgattctaggtcataagaccttcattccagaggcatcctgccctgtatccgggaagaaggaatgctgcacacagatgccgagaagaatcggaacagacaggcattgctggatcccccctcggtctattaccacgagatcaaactcttttgtccaatcacatgtctacagtgctgtccattcttcattgaatctaagcagaaaaatgggcagttttccctgggtcttccggtcttcatttctgaagtcttccatgttacataaaacttttttttttttttttttttgagacagaatgtcactccgtcgcctgggctggagtgcagtggtgcgatcttggctcactgcaatctccgtctcccaggttcaagcaattctcctgcttcagcctcctgagtagctgagactacatgcatgtgccactatgcctggctagtttttgtatttttagtagagactgggtttcgccacattggccaggctggtcacgaactcctgacttccggtgatccacccgcctcagcctcccaaagtgctgggattacaggtgtgaaccactgtgcttggccccatgttacgtaaaactctgattaaataaatttgtatattttttcctgttaatctgtctttgttttatttcagagccagccaggaaccctgggagggttgaggaaacatttcctccccgacatgtagaaatcttttaatgcaaggacgtgagagtttttgagtaaagtatagatactgtcaccggaaaagggatcttgtcccagaccctgagagcagattcttggatcttgcacaggaaagaattcagggcgagctgcagagtatagtgaagttaagatagtttattagagactactcaattacagagtagggtgtccttagaaagcaaaaggaagaactcactaccttaaacatagtgcttgcttctataggttgttaagaatagtgtactttattacaaagacttgtgatcagcttgtgacatgctattagtattgttattttcctatgttactattgatttcagcaagaattaatgagtatattatatgatctttaaagcaaaacctagtcttaaactaagaatgctttttgttcttaaagtactaggacatttccataaattctgggtctttaattagttattagcatcattaactcattccctcaaccataaatgtcttgtgaccaacagtgcccaacccctcgggaatgtaacacagcaggtttgcttttatccggcctttattcaagatggaatcgctctagttaggacgcctctgacaatacttttggggatttcaaatgctattggtgatttagtagagaaaattacatgaaagaatcatactaaaaccaaatctgataacttttgcaaaatgaaatggatgttggtaacaacttaatgaagacattaattatgaattgacctcttcaataaagtttcaaggtggctaccaagacgcacaattgtaaaagatgtatatgcatcctaataaggtaaagcacttcaaaattaaagtgacactcaaaattaaattgatgcaggtctttagtcaaatgcataattttattcatctgtataattctgaccttcttgctattgctgaaatcgcagtcttgtattcctctaccacttcacaaatccatttctgttcccatgcattgcagtaggcattaagattgtccagctccaaaattatggtcaacttactgtttggatatttatttgaattttcaacaaaattttcttaatttaactatttatccaaatatttactgagtgcctactaagtgccaggcactgttctggtccttgggatacatcagaaatagaacaaagattgtggcccttgtggagcccatagtctaaacaggggtgacaatgaaaataaacataagaaatagacaaattatgtagtatgttagaagctgatgggtgctatgaaagagatgatgtttagagttgcaggttacactgtgataaaagaaacacttcagccaaattaaatttaaagtttaattgagcacaaaacaattcgtgaatcaggcagccttctgagccaaggtaggctcagagactcccgcgcagccacacggtgggagatttatggacagcaaaaggaaagtgacatacagaaaatggaagtgaggtacagaaacaactgggttggttgcagctcagcgtttgctttattagaacacagttcaaacagttggctacatttgattggccaaaactcagggattgacacaggtgtgggctatggcctgtttacaccttcatttgttatagctcatgatgtacagaaaaacctttaggctgaacttaaaatatgcaaggaggcagctttaggctaaacttgatttaacaactgtgtcaactctcaccaatgccacccacctccccacaccccccaagaagggacagagaacatacatgttttttaatactattgttttagggaacatttgtgagatgaggtccattcatgtgtggggtccagggcagaggcccctcttgcctagtttaagggcagtattgagggtagacctcattgagaggtgaaatttgagcaaagatgtggaggagataaaggagttaacaactgcagccatgtggagaaaacaaatttcaagcagaggggccggccagtcagtgcaaagcccttaaagcaggactgtatctggcatgtttggtaaacagtaaagaagcaggtatgtaggtagtgatgggagagtagaaagagacgaagttatgaggagccagatggtgtagagctctgtaggccaattgtaaggactttggcttttatctgagagaagcggagagccaatgcagatttttgagcagagatgtgacatgatttgatttatatatccatttagtcacaaataatttttaaaggtgttttggagaataattaaatgtgaaattatgcacatttacgttgactgtgttgttttaagctgggatgttacaatctcattgaagattataattctggagtcaaattagctgaagactttcctgcttaaaaagttttccagcatgtgatacatgcgtaagtagagcttttttaattattatttttttttttgagacggagtctcgctctttcacccgggccagactgtagtggcgctatctcagctcactgcaagctccgcctcccgggttcacgctattctcctgcctcagcctctcgattagctgagactacaggcgtccgccaccgcgcccggctaattttttgtatttttagtagagacggggtttcaccgtgttagccaggatggtctccatctcctgacctcgtgatctgcccgcctcggcctcccaaagtgctgggattacaggcgtgagccactgcgcccagccaagtagagctttcttctatatacctattactttacttttttcttctttttcatgttcttcactacacattttgtgtgtgttcctaggaaatcttttaaactaagttttatttgatatgtatatttagtatcgatgttctaagatactattgaataaaatacatactgcagtagcttagttaaaatactggaaccgaggccaggagcggtgtctcatgcctgtaatcccagcactttgggaggtagaggtgggtggatcacctgaggtcaggagttcgagaccagcctgaccaacatgatgaaactctgtctctactaaaaatacaaaattagccgggcatggtagcacattcctgtaatcccagctacttgggaggctgaggcaggagaatcacttgaacccgggaggcggaggttgcagtgagccgagactgtgccactgcactccagtcagggaaaaagagtgaagctgcatcttgaaaataaaataaaataaaaaacactggtaccgaaaaaaataatagtcacaaatggcattactttgtgccttttacaaacaaataatactttgagggccaattgtataccattatcatctaaagtctgtctcattttctttgctttaatgaaatcatgataatctattattttctactcaaggttaacagaaactggcttgttacttaatatttctttgacttcttttgtccattaaaaaaggggggtgtttttaagattagtgggtgaaagttgatgtataaataagagtagacacagctttaggtaaaatgacgaaacaggttaagtttggcttcctctttttgtttcagttcaggcacatgcacctagcacaatacttagcgcattgtaggtgctcattatatactgcttaaatgagtgataagttccctgagacatttatttcctgcacttgttagggttcagtgagccgatatcccgccactgccctccagcctgggcgacagagcgagaatctgtctcaaaaaaaaaaagataaaaaataaaaataaaagactacctgccagaggaagtgggcaatcttcgcctaaagatatgaactgctaatggttaaacatcagacgtcagagaagacatattttaaagtggggaattttccccaagagcaccctctaaaccacatcagtgggcaacttaacgcactttgcttgtcattgggttagatgggagtttgaggaattgggagtaacatttggtatataggcttgggacataatatcctgaattatttctatttcataattcctgtgcaaaaaattatgggagttgttgattctacagcaattcctgtcaatttgtagattatctgcttattaatagtttgtattgtttggcagaacttgaaaactaccgaacgattacagttcaggctttttcccagtacctctggcgttgctgtctcagtgactaggaggtgaggagggtggcccttgaaatgccaaactgcctactgcagcagtctgccagcagcgtgctgggcccagagccggggatgcagccaaaacatcctggattttacctacagctcccaccctctggagggactggtctattagggcatatgacactgacagtgcgcactgtatacaaaccgtgtttgaacaggagtcggttggaaaatacaccactgcactgaattacttctgcagtggctttgcaaagctctttttgtttcttgaaagaagccgacggtaaccattacaatatggctttttccaggtcccagaggaaggctaggggtgccttgtgggtaaccctttctccctctcctgactccttcccgttatttcttctatcttcatcctctagacctacacaatgggacaggttgacagtctgtgttgaatggaagaggcggacgatgcgcttgtgtttggtgcttctcaaacggtgctcgcactccccagggtctgacgcagcccactacgcagagccctgggaggaggtgcggacccagggtacgacccccgaccgctgagaaacccagaccgggccccggctgcagccccgcgggtcggcccgcccccctgccttccctattggctcggcagttccacgcgtcacgcctgcgacgccggcgctgccctcccagaggaggcggggcttacacgcgcgaggcggagccaagggcgcacgcgcagacgagcgggtctgggtccggacgaggggagggagggggtggtgttctcggtttcctgggttacctgggcgggcgggggtggggagtgcgcggcggcggcggcagcggcgtcggctcggggttctccgggagagggggagtgcgcggcggccgcagctgccacaaaccaggtaaaggcggccgccgggcgccgacgctgccggcagaaggttccgggtcccggcccctctgcgtggcctggaggggaggcggtttggggctggtggctgtcagcctgggttgagggccgggaccgccgggctgagggcgcgagggcgcgagggcactcggcctgacgcgccagctcggggcgtcctctctggcttctgggctctgggacttctcgcggcgccgggccgcctttgacagccgccgggccgcgggcgggagctcggctgggcccctctgggccattgcagcggccactgggcactaactttatttcgcagcgcgcggggggcgaggtcgagcaggctgacggcggtgtgttgctacctttattttattttttgatcctgtgccgctgcactactcagcccagctgggcccaagctgtcaggttgacgatgggagttgacggtttccgcgccaccacccagccggtcactccccgcgctgttgccctgcggcgctcgcccacctgtcacctacaccgtgcgcctcggtccgctctttcctcctgtccgtgacaccctttgactgggcgagagcctctctttccaggggatcccctgagacatctgccgtctgtctccggtatcactggagcctgactgagatgccccttcgcttctgatgggttaaataagctgggaaattacccgagaagaccccggtaccacagtgtaaagcccaacgaaggggttgtttaatggtccaggggatacagaggctttaagaaacgtttccttaacgctaattcttatctggttaaacaaaacatagcaaaacatccccgatccgctcggcagaccatacacacccagcgacggcacttgatagttaatggggtttgttttaagcagatagaaaattttaagggagtcgaatcttgtgttgaatgcgttcgtgttgaatttgggccagtgtttccttgaagatcaaatgcaggttgcattttcctattgtttgtttaacagattgataggacaaactgaattagacttttcttcctgatgattcttggctcttctgcgctattattttaaaattccacgcctagattcatctatgctaataaagatgttgactttaagctttcaatttatagatgtagttgattaatatggggtatctgttttaaagagctttgttaagtggccaacaactctttttctgatagctctttgctgtcatccatattgttactacaaagattggagaatttgaagaagagagggcataaggaaaaatgaattgctgtaatttgcatgaaaatacttcacaaactatataattatatatatgtatttagtaaatatttattgagcacctactgcgtgtcagatacttttctaagaaaacataaatatctgctccttcatggagcttatattctagtggggacctcagataataaacaaataaaatatgtgctgtgtcagatggtgttaagtactacagagaaaaagcagggaagagggagggcagggaagagggagggcagggaaccgggagaggtttgcaattttaactagaggcagccagggaaagcttcctagaaaagatatcatttgagccaagaccagaagtaagtgaggggtaatccatgtacctctctgagggaaggatgtgctagcagagaggaaggcagaagggcttgcagaagccctgtgtgctgggcttgtttgaggacagcagagaggctgatttggctgtggtggaaaaagcaaagaggagtagaaataaagtcaaagaggtgagtgtggtgggagattagactgtataaggccttgtaggcccttttaaggacttgagtttctactctcagtggaaaggggagtccactctttgagtaaagaaccttaccttttatttttagttttgagtcaggatctcactttgtctcccaggctggagtgcagtggcatgatcacaacctactgcagcctcgacttcccaggctcaggtgatcctctcacctcagcctctgaagtaattgggacttcaggcacacatcacccaccatgcttggctaattttttgtaaagatggggtttcgccattgttgcccaggctggtctcaaactcctgggctcaagcgatccatccaccttggcgtgtcaacattctgcgattgtaggcgtgagccactgcgctcggccccaggcttgccttttaaaaatgatcattctgggcgctggatggagaatagactttgttgtaggggaagggttgagcaggagcagaagctgggataccaatccggaactgttgccctaatccaggccagagataatgtagcttggaccagagtggaattggtggaggtggtgagaggtcattgatttcaggataaattgagggtagagatgtaaaagacaccaaaatttagttccgaacaagtagaaagatggggtacttgtttactgagattaggtttacgagaggagtaggtttggtggggagaagggtgggagttggttagaagacaataaaattagacattcacgtttttaaagaaaaaaatattcaatgatacttgtttaagaatggtaagtaaggctttattcagaaccatctcaataggtatagagacctctgcagtggggccctgcagtaggggagggagactgggctcaactccgaatacagcatgagaaaatgggaatttatagccaagcagcagtgtggggatcgtggatggaaaattgctaaaaggaaacatcagggataagggggattctggctaagccgacctaacgggattcttgctgaagacaggccagggcgatcagacattacctggggaatggtggaggatgaggaacctgatcagatatttaggatgattagatatccaggatgttatgctaaacagacttagcagggttctttgctaatactggattttacaaggaagtgcacagatgggcctcacagaaaattcaaaagcctgagtaagtttggccaagcaaagaatttttgtcaaagctgagattattagtagtaaacacaagtgactttgttttgaagacactttttacgttaccttgactataccagggggttaaaaatttcacccataaactgccagctttgatttcatgattattttcttcttaattcttttggaccaacctagtcattcttttcccaattgtagttttatttttgtttgattgcactcacatagtgtgtttgttagcttcggttgtagagagagccatatagtctggaatttcagagtacctttttggtctgttgctgtatttaacttgaacaccttcatctgattaatcttttcctgaattatctggttgccggcttaagttcaacattttttttttttttagacagagtcattctctggtttctcttcaaattgtataaatctttcgccttttactaaagatttccgtggagacagagtctcgctctgtcacccaggctggagtgtagaggcgagatcttggttcactgcaacctccacctcccaggttcagccaattctcctgcctcagcctccagagtagctgggactacaggtgtgtgccaccacacccggctgattttttgtgtttttagcagagatggggtttcactgtgttagcctggatgatctcaatctcctgacctcatcatctgccctcctcggcccccaactgtgcctggattacaggcgtgagccaccgtgctgggccaagttcaagattttttttaagccctaaaatgttatcaagtgtggctttacttggccatttgcaaaattacaaaggaaatgactcatttttaatactttgtaatgtcaaaagacaaaattacaacaaatttagcttaaagatcttacttcacctttgccattgtagaatcaggcaacacctcattttataaaatagaacaagtgttctcatgagccgagcagaagtggttggttttatggtagtctcactttatcttgaaggggtgtgtgtgtgtgtgtgtgtgtgtgtgtgtgtgtgtgtgtgtttgtttgttttgagatggagacttgctgtgttgcccaggccagagtgcagtggggtgatctcagcttactgcaaactccggctcctaggttcaagcgattctcctgcctcagcctcctgagtagctgggactacagatgcctgccaccatgcccggctaatttttgtaattttagtagacatggggtttcaccgtgttgcccaggctggtctcgaactgctgacctcaagtgatctgcccatcttggcctcccaaagtgctgggattacaggcatgagccaccgcacccggccttggggagatatgttctaagatccccagtggaagcctgaaatggtggatagtactgaatcctatatacactatagggcaggatgagatttcatcatgctactcagaacagggtgcaatttgaaattatgaattatttctggaattttccatttaatattttcagaccacagttgacctcaggtaactgaaaccttggaaaatgaatctgcggataaagggatactaccgtatacactgaaaaggggtgaggaaaacagaaacagaaaagaaaaagcaaattggtcatttaaagttacttttcttattagggttaaagcagatgggacttccttatgtcagtcatatcatatcatatcaactggcctgtttgggatttgactactaactctgtctctcctgattgcttggaaggtcagataaacaacttagttttggcttggtgaagtggaacttcagcatgagtgactccattttgatttgatctgttgtccctagtgcaggaggaactcagtctaaaccagtgacctcctataaatttcatttaacactggtaagttagtaatatgcagggattagcctaattgttttgtttcagtaaagatggcttgaaataaatgggccatcacatgttaaatgaagatcttctaaatcaaattatatagtatttgtagcaatagaatttgccctgtaaaacttggataaaaagtctatcagtctccgaagccaggagccatggcttgtgcctatagtcccagttacttggaagactgaggtgggaggatcgcttgagcctggttcgagtccagcctgggcaacacagcaacacgtcatctctaaacagaacaaacaaacaaaacatatatatgtatatatcagtcttctggaatttaaggtctacactttaagaaccaggaaataagctaattttttaaaatggattttcaacctaaatatatcttaaaaatgtataaaaatctgtcagattaataactaattataaactgatcttggagtctttgagggcactgtattgtctttgatattattttattttgctgctgtgtgtcaccagtgtttggctttgtaactcttaatcccccaactttgtttacagtaatgagagaggtccaatacgtttggaaatgttgaaggctttccaggtctaactgctgaaaaacaaaaatcttacctaataacatgaaagattaatgcttaaaattgattatcttaatcaagaaaggaatcaaataattttcaaaaggctagtcattgttccattcaaatatgattctttgaaattaaaacataaaatggatgaggacataagagagcttttcactattttaactgaatggaagaaataaatgaacaatagggtagagtactacacatattagaaatgtttataaaactactgccactcatctttaaaaagcaatgtttatataacagattactacttagcaataacaaggaatgaactttagatcacacaacaacatggataaatctcaaaataattacacagcacgaaaaaaagccagaccaaaaagaaaaaaaaagtacatactgcattgttccatctgtaaaattctagaaaatgcctattaatctataatggaagaaagatcaatgctggcctggagataagttacagagggaaggggcaggaaagagggagaacagtggcatactaggaaacttcaggggatactagatatgtttactatcttgatttgatgatggtttcatgggtgtacacatatgttggaacatatcaaattatgcactttaaatatgtggtttgttacatgtcagttatacctgtaaagttgtgtttaaaagtggcttgaccatgaaaagacatgaagaaatctttagtgcatatcactaagtgaaaaaaggcaaactgaaaagtctgcatactttatgattacaagtgtatggcattctgggaaaggcaaaactatggagacagtaaaaagattagtggtggagagaaggagggatgaatacgcagagcacagaagatttttagggcggtgaaactattctgaagatactacagtggtagctacatgttattatacatttgtcgatacccatagaatataccacatcaagagtgaatcctaatgtaaactgtggactttgggtgataatgacctgtcagtgtaggttcattgattataacaaatgtaccagtttaggggggctgtccatagttggggaggctgtacatgtgtgagagagcagggtgtacatggaaactctgtaattgcctctctgttttgttgtgaacctaaaactcttctaaaaaataaagtctttttttaaaaaagaggatagaagatttctgccagaaacctgaagaattgcatattttacatttaaaaatggggggagaggaaggtaaagtccagaaactatatattgaaaatcttgacactgactgattcctagaaaaactatagaccagcttgccaagtgcttagtgatttgtaattagaaaagaaagcactgattactaagacccagaatttgtttaagaacaagtcatattaagctaacttcatgcttactttgccaaagatgtaatagtatttgtatgatactctttgtatagtactactttataacttacagagtacattcccatttattattttatttaaccctgacaacatccctttcaattcgtgtaagatgagaaagacctcaacagtaataatcccaggaaggcgcaaaggggacagatgtgagagattttagaaaggccttgtgtagttatggataaaggagagggaggaatcaaagcaggctttaaggattctagattgtctgagggtgaatggggatgcagataattactcgtaatttaaaaaatacgggtggaggagtggatttggagatgtgaaatccatcagttttcttcagtttggtggaattagctgttttatttcctttgttgaaactgagtcagatatagatacatttaaaaaaaaaaaaaggcctggtgctcaggagagaagcctaaacccaataaaacaattttcatttgttcagtaaatatattctttcaaatacttttggtaatgaagggaggttagtgggtagaagcttgaggaagtagatgtgatcattgggaaggtttgtctgttttaaggatggagaagccaaggacacttcagtggattgagggaaagggaccattgaagaggaagaaaattgaagtcacaagaggtagaagataattgatcaaatgtaacgagaggaaatggaagagtcaggtccaggaggacaaatgaaagagttaccctgaagaagaggaatgatgtatcttcctgtttaaaaacgaaaaggaaatggggtagatatagatataagttagtatccaggatgacatctctttttctctgtgaagcaagattatctgctgagattgagaaggaagaacatgggttggagtatgcttgaggggaaaataaaagttactattgagattgtaaaagggacttaactaggggcatgtgacttctttgctgaatcatgatgaatacccttccaggcttgaaatcacaaatgtacagaggccagcaggatggttaagcagtgttctccagcagcctgcctgctcccactccccttccctgccccccataacaatgcagaaaacaaatagactgaacttggaccactccccttccccacccccataacaatgcagaaaacaagtagactgaacctggattgagattggaagggaagatgtgatggaaaacttgagtagggggtagtgggaagtcaaggaatagagagtggtaatgaggctgctaattgaagggttgagccataggaatcctgcttattaaggaacaaagccaagccaagacaaggctggtaaatgtggataatgaagaggatgaagaatctaaatgagtcaagtgcaggattaatggaaataaaagagtactagagatggaaaaattggcacatagatgtgagaattctcaatttaagattctggagttagcagtttcaggtgatgataagggccaaagaatgaccaatgatgggtggatagccaagattaatagtgctaattataacaatattaataaaaactactattcattgaacactgtgtagtagtcactatagtaaatattttccataggttatcatgcttatgtttcacatattagtatcaacattttacagatgaggaaactggagctcagtgagattgagtaacttttcccaagactcacagctacgaagtacctgagtctttctgagtccttctagcattgaagcacttatgcctgactactaaaccatgctagccttctgcaaagtaggggtcattgaagaagaaggcaaagagcattaagtcttgtgtgttggaatcaattgttcttatggataatgaagtccccagaatatatagcttctgtgtggaaaggaagatagtcatacgacaaaattctcagtaaatggagatggctgactcaaaggtcagtaggtgacaactataaatatagctataatgtaatcttaaaagtggataaaatcgaataacaatgacttacaagtcatcttgggaaactaggagaatactgacttgtcttcctggcccccaaagtgatgcatatgaaaatattaaccattcatttcttaaccctctcttctctcttggcttgtgaaattttatatatatatgtgtgtgtgtgtgtgtgtgtgtgtgtgtgtgtgtgtgtgtgtatttacatatgtttgtgtatatatacgtgtgtgtgtgtatatatatacacctgtgtgcacacgcgcacacacacccacagacacacccccctcttttttggttttcctcgtacccctctaaccactcctcttcagtctcattggctggattcttctttgccagctccttcatgttggtgagcctctggattctctcctcctcctcatttctctttctttgtgctttcctttgatgatctcatctatttctaagctttcatataccacctatatgttaatgacttctgaatgttcatctagagatgaatctagaactttcttcaaatcccaacatccttatataggaagatgtacccagaagaaatagcccatgatatttcagggcaatatcatgtgactagagaaagtcatcttaggctagtaatctccactcatgcccatctagttgagggctcaattcacttattttcaacatccacaaccatttctaaggtgatagcttctctggttacttatcactggtatgaccaaacatcttgatttgcctaagatggctctggtttatgcctattgttcaagaccaacctggccaacatggtgaaaccccatctctactaaaaatacaaaaaattagctaggtgtggtgacgcacacctgtaatcccagctactgaggaggctgaggcatgagaatcgcttgaacctaggaggtggaggctgcagtgagccgagatcgcaccactgcattccagcctgggcgacaagagtgagatttcatctcaaaaaaaaaaaaaaaaaaaaaatcagtatatcctgtgtaacttgtaagagctgcttatatccatcagctcactcttatcctacttttcatatttaagtgtctagacttcattgtacctttactgcattatgacttagagtttgttcaagattaaaatcttttgccatttcctgaatttctgcttagtgatgcttccaaagacagtaatactgataattagtcttgaaatatttctctattagccttatttaaacattttggagaatgtttctaaagtcatttgctccacattactgaaatatatttattttctcttcaccttattttttaaaaaacagaacccagtaaggcagttttgataaaacctgattatgcacagtttaaggaaacattgaagatgtataattttaatcttaaattaatgttgatacttactacattttctgaatgttgtactctcataaaagttcacaacccaaagaggcatttagagatcatctagtttttgttttttaaatatctgtaagaataatgggcatcagaaaggttaagcaccttgcctgagatcctaaagagaacaaggcaaaacagaaaactgagaatctcttgacttttagtctactattctttctgttatactaccaaccatttgaaaattttaatgtattttaagaaagtgatctcataaccaaaagatgtctgtgcatcatagaaacccatagtgtttggttttcaatatgtaatttccttattttacccctttaactttaaccctttttctttatacaagtctacatttagaccacagtgatagaaactaccgagtatgatagaaactacccagtgtggtagggaaaaaaattatgtgggtggaatttgaaatgcctgtgctcagaaaatatttatatatatttctttcttatttctgttctgtgctctgctcccctaactatccatcttcacacatggttatagaacagtagattcagccaccagatctgagtttgaacttgtggttatctttcttggtgtgaaatgttttataacagtaaacacatttttctgtaattgactgcctcaattattgttttttctttcttttgaagggaagctaatttttttgtttcttaagaattatgaaataagaggaaacgtgctatctatacgtgcaaggtgtatttaaagcttataaatatctgtgttcagtatgtctaaaacttattttgcagaatcttctaaaacttattttgcagaatctttaaccttatgcaaaatatatatgaaaaaagtttattattatagtacagctacataaattatttttattattttcatttcacatttaggataaggctccaagctgtttttagcattcctcaggaggtatggaaaactatcatgcttataattgattttcaagaacttttaaactgtatgctttggattatctttaacagtatgaataagcatccaaaattttattgctgaaggtttttggttttaatatgaaaaatgtttggtaaggtttttaaggtgtttcggtagtgccttaaatgctaattgtggaatagagagtggcttttgtaaatgtgtctgtttctcagagccttacctgggggaacatttcctaaaggtatttgaatattaaaatgttttctatcaaagttagtattaaatgaactggtgtttatttattgaactcttgtatctgtggtactgtgttagatgctcatatttttctgatcaaataagatctggtttcctttcttaagaaaagtataatctagttttaaaagaaacaatacagtacagtgtggtgagtgataagatagaggcatatggaaaagtaattaattgggaattaatgggaatttccatagcaacatgataaaaaattagttgagaaagtgtataccctttgaaggaattgcagggtggtacaacgtgttatgtgttgggagtttggaaaagctaaattgtagcaggtattgcatactttgataataagcagttgggatcttcttccctatgaattggagtgacatttgtcattccaagggatatgagtaacatttttagtggtagcatatttagattaaacagaaaatagaccagacagtgtgatcaagtaggaggttgttagtattgcaagtaagagaggagttgaaggtctaaggatgcttaggtgtaagattagggggaaggaccagattcaaggtgatgatgataatatctaataataattgattttcctgcaatctgccaggcactgtgctatgcattttacatgaattatctcgtttaatgttgatattcgcaacaactacagctactcttatgaactcagttgtatagatgagaaactgaggcttagaaagaggaagtcgagtacccaaggtcatagagcagcagatgcagaggtgaaccagtaagtggtcaagagggagaattgactaggcactagatgaagtgctattctggtttctcacctcagtcactgggtagaggccatttactgaaagaggaatgaagaaggaagagctggcttattggagagagaagtcaatgtctgctttggagaatagaaatttgtatatagaatacaaagggattgcatgagtctgaatcctggccctgacacttagtaactctgtgactttgagcaatgacctaaccttactgtgcttcagtttccaatatgtgtcaactagggataataatgttacttaggagattgttaggaggattaaactaactactctacttacctagagtgcttacaatagtgcctgatgtgtagtaattaatcactgtaggtgttagccagattatcatcatcatcatcatgctataaaaatccaaaggtctcttttgaggagggatgtagtagtcagtgtaaaacatctagcacattccttctaacagggatagaaagccggggagatgatttacctggatgaaccttcatagttcctttaaatgccgtctctctctctatagctacaatatctcagaatttctacccttttgcggtgctcagggccaaacacaggttcttcctgagatatctggttgccgaatttgtttgtttttaggaaaaatgaactacctgttgaaaggcttaagtttggtgcgttttagtgtgacttcctctgaatttctattaaaattttgcctggctgccctatgcctgagtttcctttatttcctggccagctttgttctgcaaggagccagagtaacctctcctccctaggtcagcgccccaggtttcaaggcagccggaatggcatgttaaccaagatttcatgggcttggggagaggggtagcgaaataggcaatgttgtttattgacaccctgaaatatgaaaaaataatatgtacacctttctgggccattgctgtcttagatttccattcttcccccagaactactgccttactgctgttatacatgtttttttttttagttttctttacacaattctacataaattggaaatatttcattaaacacatttttctactttaacttagcttaaatgcgtaatacagaataaatataggaacagcacaaccatttatttccatattcactagttaaggattattatattcccacattttaaatatagaacatctagttcagagccaattcttaaccctccgatgctgaaatttctgatgctctttagagctgaaggtgttacttcttgttaaaatgtacatacttcttttcaagaggagcaacatttttcttccaagtcatttactttttggtataaatgtacaatgtggaaacatggaaaaagataacaaagctgtaaaacatcttgagaagtttgtgggggggcaagaagtttgtggtgcttggaggcgtgcctgggagttggcactaagtacagctgtaattagtcagttttctgtcctgtccacacagaaaaccgtctagttacagttgtaagttgtgccagacctaatcgctaaaatgctctgaaaggtagaattctgaaagatatagtttggttgtgagtagtctgtcaaaaattgtatgcagtattaggaaaaacattggataggactctgcagacctagctgttaagtcctctgacttttgggaaatctcttaactgctgtctgccttagtttatctgtaaaattttgagggaggtgatatggtcattaacccagagatcgtttaactctctgaaagttgattgtagaatggattctcattttaaaataatttattaaatgcgaactctggcagttttcctttattgtcaatcaacttgtcacttacctcagtattagttgaaaaaatgtcttttgagtatggcagttacgtcttacatatgactgtgttccagaggctcatttctaagatggttgttgagaatgtttagaatgcataagatttgcccttacagacaaaataaactacagtatacttgagtgttgcattgtgagacttccccgggaaaaaggtccggcaaagtgctgagattacctcaacatgtctaactggcttactgtttgccttacgtggtactatcctacttttggggccctttccccagattgttggagctaccacaaatggctttgaggtacaggaatctcttctccctccctgacaggcagggggctgggggagaatggggcaaaacatattgctagcaattcaagttggaactctgaattcattttcccattgaggcatgagttgttactaagattctgtagggtctgtagttaaaagccttaacagcatttccttcctgaagctgtcccaatgttagtatctacggaactggagaccacaatctttatttcctaagaatacatgacatcttgacttctagtcagatgctccttaatgcactcttcagagaagcaagttcagtatttgtcaagaagggcctgggcgctaaacaactgctatcatttcttttaaagttaatagattcaatgaaagttgaacataccacgaagtatggtgagtagtcaataaatatgggatcatgatttgtcttatggaagatttcagtttgtgaaaccatttatattattgttaaattggttttcatgaattttcttattcagttatttaatttagaactttaagtgtcatatctttccctgatctgcattttaaattccaagaggaatttgatcacacaaagcccattaaatattttaatttcccctatttagtgagtaccagattttgcttcagtattctcgagagtgtatttattatccactataaaatagattataaaggtttttatattaataaaagtaaatatataaaaataatattcctaatgaactttgttttgtctttagttaggaatcattctttttttgccaataaacctttttatttttattatttttaatttttccatcagttattggggtacaggtggtatttggttacatgaataagttatttagtggtgatttgtgagattttggtgtacctatcacccaagcagtatacactgtaccatatttgtagtcttttaatccctcgcccccctcccactcttccccccaagtcctcagagtccattgtatcattctatgcctttgcatcctcatagcttagctcccacatatcagtgagaacatatgatgttttgttttccattcccaagttacttcacttagaataatagtctccagtctcatccaggtcactgcagatgctgttaattcattcctttttatggctgcattgtatttcatcatatatatatatatacacacacatatacatacatacttacataccacagtttctttattcacttgttgattgatgggcatttgggttggttccacaattttgcaattgtgaattttgctgctataaacgtgtgtaagtatctttttcaaataatgacttctttttctctgagtagatacccagtagtgggattgctagatccaatgttagttctacttttagttctttaaggaatctccacattgttttccatagaggctgtactagtttacattcctaccagcagtgcagaagtgttccctgttcaccacgtccatgccaacatctactgttttttgattttttgattatggccattcttgcaggagtgagatggtatcacattgtggttttgatttgcattcccctgatcattagtgatgttgagcattttttcatatgtttgttggccatttatatatcttcttttgagaactgtctattcatgtccttagcccactttttgatgggattgtttttttcctactgatttgtttgagtttgttgtagattctggatattagtcctttgtcagatgtatagattgtgaagattttctcccaattctgtgggttgtttgtttactctgctgactgttacttttgccatgcaaaagctctttagtttaattaggtcccagctatttatctttgttgttattgcatttacttttgggttctctgtcatgaaatccttgcctaagccaatgtctagaaaggtttttccaatgttatcttctagaatttttatagtttcaggtcttaagtttaagtccttagtacatgtgtagttgattttttgtataaggtgagagatgaggatccagtttcattctcctacatgcggctagctgattattccagcatgatttgttgaaaagaatgtcctttccccactttatgtttttgtttgctttgtcaaagatcagttggctgtaggtatttgggtttatttctgggttctctattgtgttccattggtctatgtgcctatttttataccagtaccacactattttggtgactatggccttatagtatagtttgaaatcaggtaatgtgatgcctccagatttgttcttttcacttagtcttgctttggctatgcaggctcttttttggttccatatgaattttagatttttttttctaattctgtgaagaatgatagtggtattttgatggggattgcattgaatttgtagattgcttttggcagtatagtcattttcacaatattgattctacccatccatgagcatgggatatgtttccatttgtttgtgtcatctgtgatttctttgagcagtgttttgtagttttccttgtagaggtctttcaattcctttgttaggtgtcttcctaagtttttttttttttttttttttttggagctattgtaaaaggggttgagttcttttatttgattctccacttggtcgctgttggtgtatagaagagctactgattcgtgtacattaatcttgtatccagaaactttgttgaattcttttatcagttccgtgagctttctagaggagtccttagggttttcaaggtaaacaatcatatcatcagcaaacagtgaaagtttgacttcctctttactgacttggatgccctttatttcttcctcttgtctgattgctctggctaggacttccagtactatgttgaaggggagtggtgagagtgggcatccttgtcttgttttaattctcagagggaatgctttcaacttttccccattcagtattatgttggctgtgggtttgtcatagagggcttttattacattaaggtatgacccttgtatgccgattttgctgagaattttaatcataaaggatgctggattttgttgaatgctttttctgcatctattgagatgatcatgtgatttttgtttttaatcctgtttatgtggtgtatcacatttattgacttacgtatgttaaaccatccctgcatccctggtatgaaacccacttgatcatggtggattatctttttgacatgttcttggatttggttagctagtattttgttaaggattttagcatctgtgttcatcaaggatatcgttctgtagttttctctttttggttatgtcctttcctggttttgatattagggtgatgctggcttcatataatgaattaggtagggttccctctttctctttcttgtggaatagtgtcaaaaggattggtaccaattctttaaatgtctggtagaattctgccgtgaatctgtctggtcctggactttttttttagtggtaattattaaattaccatttcaatctcgctgggtctgttcagggtatctcattcttcctgatttaagctaggagggttgtatttttccaggaatgtatccatctcttctagactttctagtttatgtctgtaaatgtattcgtagtagccttgaatgatcttttgtatttcagtggtgtcagttgtagtatctcccatttcatttcttaatgaggtcatttggattttctctcttcttttcttggttaatcttgctaatgatatatcaattttatttatcttttcaaagaaccagctttttgtttcatttatcttttgtattttttttgtttgtttcaatttcatttagttttgctctgatcttggttatttcctttcttctgctgggtttgggtttgctttgttctagtttctctagttccttgaggtgtgaccttagattgtgctctttcagactttttgatgtaggcatttaggactgtgaactttcctcttagtaccacccttgctccatcgcagaggttttgataggttgtgtcattattgtcattcagttcgaagaattttttaatttctatcttgatttcgtttttgacccaatgctcattcaggagcaggttatttaatttccatgtatttgcatggttttgaagcttccctttggagttgatttccagttttatgccgctgtggtctgagagagtgcttgatataatttcagttttcttaaatctattgagactcgttttgttgcctgtcatatgatctatcttggagaaagttccatgtgctgttgaatagaatgtatattctgcagttgttggatgaaatgtctgtatatatctgtcaagtccatttgttccaaggtatagtttaaattcattgtttctttgttgaccttctgtgttgatgacctgtctggtcattggagtattgaagtcccccactattattgtgttgctgtctcatttcttaggtctattagtaattgttttataaatttgggagctccagtgttaagtgcatatatgtttaggattgtgatatcttcctgttggacaaggccttttaccattatataatgtccctctttgtctcttttaactgctgttgctttaaagtttgttttgtctgatgtaagaataccttgctggcttttggtgtccatttgcatgaaatgccttttcccacccctttaccgtatgtgagtgcttatgtgttaggtgagtatcctgaaggcaatagatagttgattggtgaattcttatccattctgtggttctgtatcttttaagtggagcatttaggccatttacattcaattttagcattgaaatgtgcggtatggttccattcatcatgctccttgttgcctctgtacttttgtttgttgttgttttgtttttgctttttaacttgcatttttgttctataggccctgtgtgatttatgctttgaagaggttctgttttgatgtgtttccaggatttgtttcaagacttggagctccttttagcagttcttctagtggtggcttggtgatggcgaattctctcagcatgtgtttgtctgaaaaagactgtatctttccttcatatatgatgcttaattttgctggatacaaaattcttggctgataattgttttgtttgaggagtctgaagttagggccccaatcccttctagcttatagggtttctgctgagaaatctgctgttaatctgataggttttcttttataggctacctggtactactgtttcacagctcttaaaattctttccttcatcttaactttggataacctcatgacaatgtgcctacgcgaagatctttttgagatgaatttcccaggtgatctttatgcttctgtatttggatgtctacgtctctagcaaggccagggaagttttcctcaattatccacccagatatgttttccaagcttttagaattctcttcttcctcaggaacactgattattcttaggtgtggtcatttaacataatcccagacttcttggaggctttgttcatattttcgtattcttttttctttgtctttgttggattgggttaattcgaagaccttgtcttcgagctctgaatttctttcttctacttgtttagttctatcgctgagactttccagagcattttgcatttctaaaagtgtgtccaaagtttcctgaattttttattgttttttttctttatgctatctatttctttgaatatttctcccttcacttcttatatcattttttggatttccttgcactgggcttcacctttctctggtccctccctgattagcttaatatctaacctcctgaattctttgtcaggtaaatcagggatttcttcttggtttggatctattgctggtgaactagagaaattttgggggggtgttgaagagccttgttttgtcatattaccagggttggttttctggttccttctcatttgggtaggctctgtcagagggaaggtctagggctgaagactgttgttcagattcttttgtcccacggggtgttcccttgatgtagtatactcctccttttcctatggatgtggcttcctgtgagccgaactgcagtgattgttgtctctcttctgggtctagccacccagcgagtctccctggctccaggccggtactgggggttgtctacacagagtcctgtgatgtgaaccatctatgggtctctcagccatggataccagcgccttttctggtgcaggtggtggagggtgcagtggactccgtgagggtccttagctttggtggtttaatgctctatttttgtactggttggccatgttttaatgctctatttttgtgctggttggcctcctgccaggaggtggcgctttccagaaagcatcagctgtagtagtacagagaaagatatgcggtgggcagggccctagaactcccaagattaaatgccctttgtcttttgctaccagggtggatagggaaggaccatcaggtgggggtggggctaggtgtgtatgagctcagcagctccttggttgggtcgtgctggggctgctgtggggaattgggggtgagattcccagtttactggagttgtgtacttaggaggattatggctgcctctgctgagtcatgaaggttgtcagggaagtgggggaaagccagcagtcggagccctcacccagctcccacgcaaacagaagggccactctcactcccaccgtgtcccccctaactgccgggagtctgtttccaggctgagggctagatgggcttgaaaacttccccgaggctatccacctctcagctacgaaagaaaagggctttagttcttccttccacctgtgaagtctgcgagctggatttgcaccctccccggagttctggccagcaggcttctcaccgcgttcaaattgttagaaagttaggctagagaattcctttccctgtggggttttaccccctgctcctctagccaccctcccaatggatccttgtggtgccaggcaggaatgggctacttaaggacccagggagctcccagggcctttctgctgcattctctacccctgtaattcactaggcttggctctctaacttgattcagctcaggtaaggtcagaaacttctccagcaaacagaccttcagcttctccagtgggggtgtgtgttcaggagaggagggtctccctttcccacttgcacagttggggcactcacagtatttgggggtctcctggggcctgcaggagcaatccgcttccttcagagggtctgtgggtcctctcgggattgctggtttgttcttgcagtggatctggagctcaaattcacaatgcaagccaccacatgctgctctgtccagagctgcaatctagtcctgcctcccttcgccatgatcccaggagctcctctctttagttaggaatcattctgatggttattgcttaacacatctagtattgactaaaaagttacacagtaaagcttagattaacagatattttcttgcttaaatattgtacagttcaactgatatgttttaactggcttattctttaaagagaattatattaatctgaacaagtgcagtttccccctccccctctttggtccccttccccccaccagtgtcctgcatttcagacatatagttctgtgttgtagtctaaaaagtttgtagagagaggtttaaaaatcttgtttccaggtgtatgtattacaatccagtggacttgagtaaaggttctggataccatttagaggtagtatttagtgttagggaaacgcctttgcctgttgtctaatttctaatcgacagaagaagaaaggctatgtatcttctaaacttgcttatttcagttttagttaattaccccccaaaacatatgtaactccaagacaactgggatagtagagtccagtgactaatcatttctgtgaccttggacctgtaggcctcagtttttctcaactgtagaatgtggggttagagaatatgatatctaaaatttctgccattatgacaacataagattctaagttattcatgtttattcctttattcatgtcatttatgaaatgatataaatggtgttatctttttttctcataaagattttttatttttactgatgtgttgtaaagactatatgagatctttgagaaagttgctaatcaatctatcaatatatattaaactctggagagctgggatttagaatagttaaatccatataaactaacctttattttcaagaaggctgcttcaaatcatggcagattttgatttaacagaatttattgggcacttattattctgtacattattttgcctaattcttaaaataaccctgatttatcacagtctcctctttggcacataacatttttgaaaaaaagtctttccaatggcaacttctctaatactattgaattgagaaaattaggcaagcacgtagtgttactttaaaagggaattttccaggattttttggcatttggtgaaagactaacaagtcttttgggtgttactgtttgatgaggaaaaagtatgctttctaatcaacctataagaataaatatcattattataaccttttttgttgttttttccttttacttcttttttttcttgtggaagccacaagacaaggaaaaagcagaaaatacagggacttcctattttttttttcagtgcttccctggaaatagcgttatgaaacagaacatcattttcctcacactgatctgaggaaagcttgcagtgatctttttcttccttcagatggcactgtctgtcataaggtgtgcagctagtactgagcatttacatagagctataaaatttgtcaacaatgtttactgaggttatataatttcttaggctccacatagcaactctgtggggtagtttatggaagaggcagccaaacttcacacagctctgtgtgactagctagtaattgctagattcctgatctgcggcttctgggtcctatttcactactgtcatgatgcctactgtatgtatatcccactattcagaacagattcataaatagtgaaaatagaatgagctggagcatattaataaatatctattaaaatatttacttaataaataaatattggaattaatgaatttatgaaaaagggaactgtagcacaatggacccctttcccttcttatcactgtggccactggctatttgatatttattgaaaaggaaactcagccacctagggaccatttcttgccctgttgttgagcttgagattttattttcagtggtacatgtaatgtccttggtagcattgtctagaacacagacatgacaaggcatctaaaaatgccattatatgaggagctgccctaaaagtgaagaatatatgtggtcatgacttgctgtgaggggcgggtgtagtagttctctgtgtcaagaagataaatgcatgaaaatccacaagactgagggtgatagcttaattctgtaatcttttaggtggataataagttgtggaaattaatcacagaactggaacagagctaagatatcaaagttaactatccagatgtctgcaggaagtctcattcaatgaaagcagagccactgttgactgactttagtgaccatttcatttccagaaggtaaaggaaataatccagggaaccagtactcttgagtctatctttgacctaacttgactacgaggggcttaattagacaagttaacctaatgaaaatcctgagagagaggccacgccattcattcggcaaatgagtagaatcgaatgcctgctgttagctgtgttctgttctagatgctagagatttagcagtgaatacaacagacaaaatctctgtcattatagggctttcattttaagaacttacaatgatctgttgtccaaaaatactagcttcatggttacttaactgcaaggaccttaactttcacttcactttagacatctgcttgcagggccacactgtggatgttgtcatctgggaccgcttgtttcagaaatctaaaaattctaacatcttcattcccacattgtgtactcttcagtctggtagagatccacacttccttgattgcctggattttctgcttgtctatcaacatttattttcctggcctctttctttttcctacccagtctgtgtctcatttttggccataaggactgttcttccacccatacccttgggtccccttcacttatgcttctgctgcctccacccaccaaaactcccatttccagatcagtgataacagtctgcactgtctattattagacccaagcagctgaatcctgctggtgaatctgaaatagctgaaaaaatccataccaccagaaattcatggttttccacctctgctaagctagtagccaaccagtaaattattttgtctgtcatcactactttcccccatttgactattcttccaataattattctaaattacttagcctttagcccccaatctctagactctcttctttaagcagacaactttgcctattacttgaatgaaaaaattgagccagtcattcttgagctccctcagtttctggccttccacctgttttctatatctgcaattctccttacctcctttccctcagcctcagaggatgatgtgtcccctcctgcttccccgccccagcctaacctcttcacctatacccttgatccaatccacacttattttctccatgaattttgtccttcattcattcgttctcttgcccctgtcttcagtatcttcccttgtgctggctgcagtggtatgctagtaaagtggctctcctggagaaagaaacaaaaaagaccctaatgtgtagcatttgcccatttccatgatggaaatactctcaccatgatgattttaagctaccaacatggtgccagtgatgctgggaagaagtacacacaatcagagctgataggagatggctggccacgccgcaccacctcttatttcttatagcctaaaaatacggttcttccaattctttaaaaaatacaaatacttgaaaaaaaaaattccttaacctatgcctccttctccagctcctctctattttctgtttttcttttctaatcctgccttctcaggagagtctatacttgctatttccttattcggtctggtattggaaaccatgagatggagttaaggatagttgttgagaaggtatacattttgagcattgctgaaattggaatgaaaggcatggtggatttagtctcagtagtcactgtaaagaagttagtcactggcctaatagacagaggactcagctcacctggtgtggagtggttttgccctgacagcagactctgcacacgtgcctcagttcttcttgtgtgttcttcgcaggtgacagtaccatttatccagttaaccaagccagtattcagagagttgtcctgatccctcccttaccactcacttctccatccaattaatcaccaaaattgtgctcattttaattcttggatatttaataaaattatattattctactgttgctttagaaaaaaatatccttaccatttgcttggagtatgacgccagtctccaaattggttttcatgcagctagagttttctccataaaatgtgtcttccacattgccactagaatgacctatgtgttcaagattgaccatgccactcacatgttcaaaataattcatgggcttcctgtcacctgtagcagtgagtctcagccctgactgttcattagaatcacctatgaagcttgttaaaaataccgatgtttaggtcttgctgtgggtttagcagattaggttctctgatcatggggcctagacaaactctataggtgattctgataagactcactagccaatagattaaagcccaaggttcttagcatagtgtacaaaagcctttcaccatctggtctttgccagccactccctccatcctcacttttcctgtttctcattttgtagttgtgataccaaacttactgtaatttcttcagtgacaacttgagctgctgtttccatctctaatgcttttcttcccttcttttctccctttacctgtacaacttcaatttattcttcatgaagcttccctggccactcaaattgggttaagtgccccttagcagtacatagtaccctatatattgatttgcctttgccaccgtaatgtaatcttcttgagggcagagactggaattactttatgttcttagtgtctgatacaaagtggttgttttgtaaatgatagctggcagactaataagcaggaagaggaatatggaacaaagccggaatatagagaattggagtacagagttcctaaaattcgaagaaaaggtaggtaagatgccagagatagtctcttgaagggaaagtggttacaaggtgataataggcagtatctctactgaacaattggaaataatatgtgaaggaaagggagagggaacatggccacatgaactgatgatttattttatttatttatttattattttattttattttattttatttcattttattttattttttgagacagagtctcgctctgtcgcccaggctggtgtgtagtggcgcgatctcagttcactgcaaccttctctcccaggttcaagcaattctcctgccttagcctcctgagttactgggactataggcggtgccaccgcacatggctaatttttgtatttttagtagagatggggcgtggtggggggggttctccgtgttggccaggctggtctcgaactcccaatctcaggtgatccacccaccttggcctcccaaagtgctgagattacatgcatgagccaccatgcccagcatgaactgatttttaaataatgtgcacaagaaagaaagaaggatatgaaaccaaatggtcgtgtgcagtggatcacgcctgtaatcccagcactttggaagggtggaggtgggcggattacctgaggtcaggagtttgagatcagcctggccaacttgaacctgggaggtggaggttgcagtgagctgagatcatgccactgcactccatcctgggcgacagagcgagattctgtctcaaaaaaaaaactgtatatatatatatgcacacatacacccacacatataaaacctatagaataggaacacagtcctggtagaataatgagctaagattttgaaaaagttgggctgaccttttacattttatatgtagagaacgaaaatgaggccaggtgcagtggctcacgcctgtaatcccaacactttgggaagtcaaggcgggaggttcacttgagcccagaagttcgagaccagcctggacaacatggtgagaccctgtctctacaaaaagaaagaaagggcgcaggggtgggggatagggcagtagggggagagagagagaatgagtatgacaaataaataatagattcttaccaacaaatggacccaataatcagatacagagaacaaatgaaatttcttagctttcttctcttctctgacatggagaatgatctacacacagactaagaagggtacaagtgagaaaaataagaggagaaaattgaagcccaagattggggaggagattgtatcagaactctggatgctctaaaatgaattcacatctcacggtcagattctgagaacatttgttaatgtcattgctcaactaataatctttgagtaattatagtgaaatgtgaaaacttgtagaagcctgtggaggaataatgttctaaaatttaaaaaaatgtagcttccatagatttttgtaaacttgatgttacttccacaaaagactctagagatcatttttaaagattttcaaatattatacttaaagaaaagatgagcaataaaggctatgtgggctttctaagaattcattccagataacccagtttctacctatagagtctacatttacagattaggagaatgctgcagctgtaatatatctagattcccatggagtatttgacagtccaccattctatacttgggaacatgaaggagagttggattatagtatgggtatagttattgaacaatggaactcaatcttgatttagttactcattggcagcctggcaggaagtctcttatgggctgctgttttttgaccctgttacactcatcagtttaacacctccttcccacttctcactctcagctggcagtcttgctgtttattgcaccaagaaaatagaagcacctgaaaaaaattcttggtcctcctattgccaaatatactaatcttcctacatctatactcgtattctctgacattcttcttattcaattagatgaactgccactgttccttccacttgtatgttggtcttcttcgttttgcctactcattgttcctagaattctctcttctcattctagtttttcatctattttcctttctctgttagagaaacatactatgtttcagcttagaaacaagctataatattaatcaggtttttttttaacctcacttatctcatgtcctcctcaagccatcacccgttcccttgcatgctttgtggcagaacttctcaaaagagctgtttaaattgcttgccttcatttcctcaccactcttttccaccccaccaagaccattctttgaaaagattgtcagtaacttccatgttgctaaatccagcagtcaattcccagtcttcatcttacttaacttaacttctcagaattcttttttttttttttttgaaacagggtctcactcttacccaggctggtatgcggtggctcaatctcagctcactgcaacctccccctttcaggttcaagcagttctcatacctcatcctcccaagtagctaggattacaggtgtgcaccaccatgccggctaatttttgtatttttagtagagatgggatttcgccatgttgcccaggctggtcttgaactcctggcctcaagtgattagcctacctcaccttcccaaagtgctctgattacaggcttgagccactgcacccgccagctttctctcagaatttttgatagcattggttactcttttctgtttcaagctttcttcacctggtttctgggagataccactcacctgatttttctcctgcctcacttgctgttccttctcagtctcctgtgttggatacttaccctctccattgactcagccatgctaagcccagggctcagttgtaaaacctcttctctgctcccttacactcattctctaggtcctcgctgttcattatagtagcccctagccacatgtggcttttgtctgctatattgtgtggcagaaattatagaacaggctcatcgtctcagaaagctccggtgaacagcactgctctgggttatttcatctgtctagttccatggctttaaaaatttattgatgatatcctgatgattcccaaattgattcactagttccagcttccctgcctgttttgatcttcagctgcctacttgattacttaatttctaagaaacctatcacacctaacatagctaaaactgaacgttattttccctcacaactgttcttatgtcagtcttacctatcagtaaacagtactattcttcacacaggctaaaaaaccttatagtcttttttgggtgggcattgggagggacttgcattcttggggagaaatggtttcaggggaacacttctatttcctctttccatgcttactttagttcctgagaaggaagaatgggttgacttttctcactttttctttgcaattattttttacctcttgtcctcttgcactcaatatcccgtacatccagcatacatttatctcagtggcttggaacgcacgtttcccagatacccacatggtccatttacttattccattcaagtttttgctcaaatattactgcttcagaccttccttgtccatcctatctgaaacagcattcctgtcactctatacccttactttgttttactttttcatcgaattaacatgacctgacattatagtgtatgtttgcttttcatctgtctccacctcactataatacatgatggtaaggattttgattctgctctaaactcagtgcataaattagtagctcacatacagtaaatgttcaataacatttgttgaattaaatggcatattgatgaaacttctgatgacataaaatgagaggtagctaatacattaaatcagtgtttgtgtatgtatgttttgtttttgcttgttcatattttacattttaccagtcactatatgaggaaaaagtgaaacattatttttctgaggaggtcatttatatgattataggcatttgttactatgtttttcatttacggtaaatgctaaggatataaaaattctacgaatatcgttggggcaagttttctttgttatgacattataacaattgttgtattagaaattgaaattatagtgataaagttagatttaaaattgggcattatagctatgaaaggtaaaaagtaataagacagggtccctggccttaagtaacttgtgacctagagggtgaaacagtcatagataagtaactacagggtgtgtctatgtagtttggaaacagaggcaaatatataatgggctaagggcatcattattaaaaatgtatctatacttccagatgttctggacacctagaatgatacaggatgataaaaattagaatacaggtgtgtataaagagtgctggcagactcaaggaggacacatgtgactgtgctggtggttagaattatgatcttggataaaatgaaactgcatagatattcaagtgaggctttgtaaactacagagataaagaagccatgccagtttaagagcattagagaaatccctcagcttggcctagaaaatgtccctcgataagagaaacagacggatctagctgaccagctgccagctttcacttcttacggccacgctgagttagctggaatcatcttagcattgcaagatagatggctctaccttgtggtagtccaagctggagggtggtagtagtcagagcagctaatataataccatctttaggcttacagtttgatccataatttcccttccataattttattttattttttccccttccataattttaaagttaaaaatatctctatgggctgggcacggtggctcacatttgtaatcctagcactttgggaggccgaggcgggtggatcacctgaagtcaggagtttgagaccagcctggccaatgtggcgaaacccccccccattaaaaatacaaaaattagccaggcataatggtgggcgcctgtaatcccggctactcgggaggctgaggcaggaaaatcacttgaacccaggcggcagaggttgttgcagtgacccgagatcgcgccactgcactcaagcctgggcgaaagggtgaaactcctctcaaaaaaaaaaaatttgcatgatattgattagctcaggaggcagcaggaacaggtatggaaggtgtgttaggactctattccagggctgttccacttggttgagccgttgatatactgctttctggtgctctgccagaggaatgagggggtgagactgaaatataccctgtgctttgatagctgtgtgccctgctgtgtggagctgcacccatcaggaagggatgttttttcctaattcacacaaagccctgcattgtctaacacagctgttttctgcctggtttatcttcaagtgcctagaataatgtgtggtacaagaactggttggcaagctgaaagaaacttaagacagttttccagatttgagcattttgaagtaattaaagatcactcctgggccaggtacagtggctcacgcctgtaatcccagtactttgggaggccgaggtgggcagatcacttgagctcaggagtccaagactagcctgggcaacacagcaagaccccatctcatttttttttaaataaaaataattttaaaaatcaatctgattttaaaacttataattcaaaatatcttcatgtttgccgcataactatgataaggaaacattcttcatgcttcttcctggtaagcactgtagagaaggggagagcaggtaactaaagagaaatatcctgttgctatcccagaaatagaaatttatcctttagtcttctagaaataaccttcattatattctactcaaaagattaattcatttaaaaacttcaataaagatatgaaatttgatggtgattaataaattaatgtttggctttggtattgtctaagttcttatgtatcctcaaatacctttcatcctaacaggaaagtaatggctgtacctaggaactctgagttgaaaacctttttgtcgtgatagtatttagatattccgctgcctcctagattctagtgttaagaagactggtctaattctcctttgcagttaacttgtgatttacctggaggttttaagttaagaactggaagaggaaaagtagagagctattattgagttgctttttcagatcactatgttccaagattccctctcaagaggaattcttgaagtaggcatttttttagtgtgctcctaagatctaaaaatttcattggtggtttcatacatcatgtatgaagactggccactgattatgtcacaactttgttaaaattatttgtggtttactattgtgattaatatgtctttttttttgtaggtgaagctttgttctaagaatatttgtttcatctagtttatgagtccaaatgatatagactgtaaatgtcacagcagtggtgaaagactggtaagtatataatgtaataaatattaaccatcaacatgattttgaaggcttgaaactacataattatctgacattcgttaaaccccaaagttaaaacagctaaacttttcttagtagagatggatgtatagtttgtggtttattcatacaatggtatattgcatgatggtttaatggaatgaacataacattaagaggaaaaagcaaagttacaaaaggatatatacagtatactatttatatctggttgttggctataacctcatgttatatattctttgtttctgggtactttaaatattagaaaaaatttaaagaaaataccgtgcaatcatctcttcagttgacattaaaaatgactgaaagtcattcaattaaattcaatatttctgttaggaagaggtgaatacttcctaatatacaaagcaaaagtgtccccatcaccacaactgatgttgttctgttagtgcaaactgatacaattagatagaataatggaaattgtatgaatattggataagataattcagaatttttgttatttgtagattatagagtattatatctgggaaattcaaaacaaaataataaaaaagctcagaagtttagatatatgattattatatcaaaagaaatccacttcctatgtgcctactatataccagttttaaatcctagaatatgttacggaaaacaaaatcccattcataataatggcaaaaatataaagcgccttggagtaaacctaacaagaaatatgtaaaacctaccttatgaaataacggcaatttctacttcaaggaagtaataagataaaggggcaagtagtataagggtgttaattgtagctttgtttatgataataaaaagctagaaacaatctattcaaaaataagagattggctacatagtaaactataatataatgctatatatgtaatatttacatgtagcagtatgccatacagctattaaagagtgagagctcatgtgaaatgtttttcaatatatctaaattaaataaaagcaagtaatcatgtatatacactaacctattcatataaacatgtatatattttaggtacatttttaaatcaggaaaaaacatacatttctgttgagattataatgccttttactgatatggcattaacttttatatctaaaaatttatattgatttccattttcttaatttctagaagatagacttaattattcccataatttttcagtttttcacatttttaatgtttctaaagttgcagtgtatcttgcaatggatagtgtcttataagcacttgtgaagtagttgacctggcctgcacatgagtgcacttgatcatagactttcacattgtcagtgcttcagcagacttctgtgcattgctggtactatacctgttgagtttttaaatgttttcctggttgttttctgaaactttctgctgataccatctggtaagatcaagaaagcaccagcatataaatttatagaatgacgttagtagctttgaaggaaaatcccagaaacgatactgcagtactcttaagtgctgtggcatgaatggtcttgatggcccagaaggtgatattgtggggaaattttatgtgataagaagcattgtgtcatagtttaattcttttttagtggtgtactaagtaattatgtatcctaaaattatgaacagattcaatgaaatatattaaagttggataaatatgaactgaatataaattaggttattggatttatttaatacttttactttctgaaagcatataaagaaccaatattaatatataatagaggttattgccgtattttagaatgagagatgcactttatatttttctcctttctaatattcaaaaatattaaaaatattgatgtttgttatactaaaagagagttactgtaatacctagaattttgatgggaatcaaagaattaaactgtgaggtcccaggatgaacaggaactaaggtagtattaggaatttctctggtacttccctttcatttttatctacttctctttgtatcccgttggttcatttttacctggttggcttcttctgaccctcagctacctcataatgactaccacagccccatctctgcgtgacctttcaggacatcaactatatccctttagtttaaattcccgagagagaaagaaaacctgattagtccagttcctctttgcaacccacactatacgagtcacatcttgtgatgagcatggattgtagctgaactggggcccagagcttgactgtgcctcttggcaagaggcatagtcatatgtgcactgccctctcagcagggactgtggggagggcttccccctgaagcgggtgaagggaggtgaggcaatacatgtcttatttaacttaacatctctatgttaaatatcttttaaaggttactggatacctcaaaattacttttagcccagagatgaaactattttgaaactccttggggatttcgttgttcatggtttttcccttctggaaatttgtacattttcctctgtatttatgttcccctattctgtttgctgtaccttatttcccttaatcttaaaatgtcacattaccctttatttgatttaaatatgtcataagaagtgaagtggcgtaactttagctattagaatttttcagtttttattcacctgattggaaatcctttttattaactgaactttggtgtttggggaggatgggtcagtgattgtgggctctatcaagtgaaaaatgggttatatttttaaaataccaatttattataaaatatataaagcaagaacattttataagtaatgggtttatttttattgtatttaagaaagaaagtcttctctcttaaaaagagaaaatgttttccatccaggtgctgttacttacctattctcagctatgctcaggtatttcaagcctgggactcatttcgccatggaaggaattatttaagaagcacctgactaggtcagaactatgcctgaaaatattatagggttaagtaccaatttccagtaattttaagccaatcttcagttagaaacaaacaacaaaaacacatagttttaaaagtaaatttgtatttgttttcctaatcttttttttttgtaatacttattttatagctcggtcatgagcaccgacagtaactcactggcacgtgaatttctgaccgatgtcaaccggctttgcaatgcagtggtccagagggtggaggccagggaggaagaagaggaggagacgcacatggcaacccttggacagtaccttgtccatggtcgaggatttctattacttaccaagctaaattctataattgatcaggtaacatttttatatcaaatacttactttcatcaatatatgatagttaactgtagctacatggttttggattacatagtttctgaagcctccttgagataaagtccagtctttcacattattccactaaaaaaaaagtggacctatttataaccatattgtttatttgaatactttcaaaacgtctgaaatatcttagaattatgaattgcctaagaactaaatggtttcatatatactatgctttttatcgtaatatcagtgagataactatggttcttagtagaaatataagacataatcttatatccctgtatcttatgtcagaaacatgatgaattttcattttcaataaatatcaagtatgtttttgaaaaatttttggaggctgctaattctggagtgaaagcagagacctcttatgtgaactaataattactgagtcctttagcttgtatacatctaatttatcaaacgtttttggcttaaagtatggtatgaccatatggttttgctgttttcttattataaaattaacagagttttaaaactagttgagactagatgttttcatctaaccttcttttacagatgagaaaacagatccagaaacattaagtactcacataaattaattttaaggccaaatgtgatttatatctttatttcattttagtagaaaatgaataattattttgtgatcgtaaaactctacaatctgctttcagggaactaattaatatagttagttgaaaaaataatgaagtgtttgtaacaccaatatgatggattttttttaacactttgaatgttaccagctttagatgtaaaattggccatcattaaataaaatttctttgctgtgaaagcattttgctaatagatacatatattgaggaaatatggagactaaaacagtacttctgttttcactgtaagctaaggaacatagcaaatacaaattaggaagcatttacttgtcatggaattttcaggacatttgtaggtttatggttttttttgagacacagagtctcgctctgtcgcccaggctggagtgcagtggtgcaatctcggctgactgcaacctccacctccgggttcaagtgattcttgtgtctcagccacctaagtagccgggactacaagtgtgcatcaccacacccagtgaatttttgtattttcagtagagatggggtttcaccgtgttgaccagctgatcttaaactcctgacctcaagcagtctacccccgttggcctcccaaagtgctgggattacaggtgtgagccactgcacccagccaagtttatgtatttttattctttttcatgaatgtgatttgttaaatgagtgattaaatataatttttatatatttgtatgacttttctgtaaataaaatttaaaatcagaaaaaatcatgttagaccatgtatagtgatttattttgaaattttgattatttaatatgtacaccatgctctgttcttccccacaataaaaaaattcaatgctttgtcttctttaaaatataccatataaatagcatcagtaatagtaaatatcgaggaatgactctaataaaatatgtacagtacttctgcatggaattctataaaacattattgagagaaactaaagaagacccaaataattggagcattatataatgttcatgtattgaaagaatcaatattataaacatacatgttttctccaaatctatagatcccaatttaatcccaatcaaaatcttaataacagcattattaaaaataacattattgagatataattcacatatcttaaaattcacccattttatgtgtacaattcagtggcttttagtgtagtcacaggtaagtgcatctgtcaccacagttaattttggaatattttcatcacctccaaaagaaactccataccctttagctatcgttcccctatcccttccattcccctacccctaagcaaacactaatctactttctatctctccagattttatgctttctcttttatgtcatgaaatgtcttttaatgtattactaaatgactgaaataattcatgtcataacagcagcaataatttttcttttgggaatattttgctagtctgtagtgttagccattctaaaagaatatgaagtagtatcttattgtagttttagttcacattcctctaacaactaatgatgttgagcattttttcatttgcttattggccatttgtatatcttcttttatgaacatctctttaaaagttttgtaccatttttaaggtcaggttatttatttatcatcagttgtagcagttctttatgtattctggaaccaagtctattggattccaaatacggtattttctttgtatatatggtaaatagaatactttctcttttaagtcataagatatattttaagatattaaatgactaaaattatttaggtcataagttaaatatttttttcctgtggtggtattttttaatcccttctttccacctagtcactttttggaatatctgtagcaataatagtaggaacagtagatgtgcctttggagtgaaaataaatagccatttaaaacataggcctttatcaacatttagttctttcaattaggaaatggagaatgaatgtttgagtttttaaggggaattaattgaatgatattttatcatttaagatgaaatcataacactagacacatagttgtatgttttaggaggaaatttagtttttctatctgtgcttctcatgaataggagcacttcttgagtactctggggtgatttaagccctttcccaccaactgtagtccgtttgctttattaatatttatttatttatttttgagacagagtctcactttttcacccaggctggactgcagcggcacaatcatggctcactgtaacctcagcctccagggttctagaggttgtcatgtctcagccacctgagtagctgggattacagacgtgcgccaccacgcccgggctaatttttaaaaatatttttagtagaaacagggttttgccatgttggccaggctggtctcaaacttctggccccaagtgatctgcccgccatggcctcccaaagtgctaggattacaggtgtgagccactgcgcccagcttattaatagacatttaatataaagaagtaaataaactttttattgaggtataatttatatacagtaagtgcacagataatgtgtatgcagttagatgaatagtgacaaatacacctcacatcagtagtcccaatcctttgggaggccgaggtagatggattacttgaggcctggagttcgagaccagcctgggcaacatggcaaaaccccatctctacaaaaaaatacaaaaattagccaggtgtggtggtgtgtgcctatagtcccagctactcaggaggctgaggtgagaggattgcttgagcctggggaaatcaaggctgcagtgagccatggtcgtgccactgcactctgacctgggtgacagagtgaaaccctgtcttaaaaaacaaaacaaaatccaaatatttacacctgtgtcatcaccacccagatcattgtttagaatatttccgccaccttagaaagttttgtcatgccttttttttcagtcagtccctccccttcactcactgcaagaccaccactgttgtgacttttagcatctaaatgtagctttggaatcatgtagtatgtactctcatgtctctgaaattcatccatgttgttgcataattcagtagttcactactttttaatttctgattagtatttcattgtatgggtgtactgtaatttgtttaaccattcacctgctgtttaatcttttgagctgtatgcatttggctattatgaataaagctgctttgaacattcctataaaagtccttggatatgttttcatttgtcctgggtaaatatgtaggcatacaatttgtgggcaaagggtaatgtttgtttaattttgtaagaaactgcccaactgttttgcaaagtagttgtactatgtttcattcttaccagcagtgtatgagaattccagttctatatcctctctaatatttgatattgccagtctttgtagtgttagtcattctaagtgaatatgaagtagtatctcattgtaggtttaatttgcatttttctggcaattaatgatgatgagcactttttctatatttatgggtctttctagactgcattgtgttccactgatctttcatgtagtcttttatcagtaccctgtctagattactgtggcttttataaaaataagtttggaaattagatgttgtaagttgtctaattttgttcttgtttttaaagaaagtttggccattctagatccttcatattttcatataaattttagaatcaacttgttatttctacaaaatgcacactaggatttcatttaagatggcattgaatctataaatcagtttacagagaattgacacttaacaatgttgagttttccaatgcatgaacatgatatcaaactctatttatgtcttctttagtttgtttctctgcactattgagtggttttcattgtagaggtcctgcctgttgtttggttaaatttattctaaatattttattcctttttgatgctattataaatggtatttaaatttttttattttcctgttgtttgttgctcatagaaatacaattgcttttcgtatgttgatcttgtgtcctgtgcctttgctaaattcattcattagatcttgaaacttttctgtagattccctaggattttgtatgtaaataatgatgtcatctgtgaatgacaattttacttttttcccaatttgtatgccttttattttgctttcttgacttttgcactggcttctagtacaaaagcagatggaagtagtgaaagtggacctcctggtttagtgtctgacctaaggagaagcatgaagtatttcaccattaaatgtgatatgaactctcagtttttcttagacaccttttatcagaatgagggaattttcttccattcccaatttgttgagtttttatactgaagggatgttgaattttgtcaaatgccttttctgcatctgttgaaactatcatatgatttttcttttttattctgtaatgtaggtaagttatcttgatcgtttttgttgttgttgttgttgttgttgttttcttttttttgagacagagtctcaactctgtcgcccaggctggagtgcagtggcgcgaccttggctcactgcaacctctgccatccaggtttaagtgattcttctgcctcagcctcccaagtagctgggattataggcacctgccactgcacctggctaatttttgtagttttagtagagacggggtttcaccatcttggccaggctggtcttgaactcctgacctcgtgatccacccgcctcagccacccaaagtgctgggattacaggcgtgagccactgcgctcagcggtagtttttaaatgtttgcattcctggaataaactccattttgttcataatttattatacacagaaattttaatctacttattctcaggggaaaatactctttttaaatatcaaaaacattctttttaatggttaaagatgacaaagttgaatatttctaccataccaccatgcccagcctatctttgcttttaatcttggcacccgtatcaactagatgagtgactttagtcacttaattgctccagagcacagtgtcctcatcagtaacataaggacattcagctggatgacttaagggatccttccagtataaaaattgtctctgtgtaatatttgaaaataatggcttctggtttcttctatgccctattgccaacatatatatcaaaattggactagtatacatgaacatgtgttataaatactactttttaaaatttcagtgatacataatttccatacctattgcactctgtggatgttttataaagttgttacttatgttgctgagtaaaatgtgaagttttaccaaagagggttgtacatttatgaacaaaatataattcaaacattataataggtttttaaaaatctttggctattttctatgtaggagagtactttattcttcctacatttttgtagtattatcacttcaatgtatagtactgctgaaatgggctacctgtagtgatatataaaataaatagaacaatatcagacctttagaagtgtggctacagtttattcactgctttactcagcagaccattaagtacctactatggcccagcacctctgctagatgcggagatgaaaggacagcgactgtctttaccaggagctcttcgcttttgaagagataggtaaataaatgatgacaaaacagtgtaaaaagtatttggtgaatgtagtggagaggggtcatcaggaactgcttcttagatattgacatccctaagtaggaattggcgatgtaaagaggcaggaaacaccagaccagaagaattgcacatgaaaaaacacgggggctagagaaaacacagcacattcaatgaactacaagtagtttagtgaagttacagcgaaggctgaactttgctttgcttttggtaaaacggggattggctaatggggagacctgaagggcagaggccatgacatggcaagccttgtataccatgttaagaagtcttaattttattctgaaaacattggggaaattttaaagcaagggaataggcaatgagaattattcttcagatttgacaagtgagttaatggtaaaattggcaagagttgtttcaataggagaataatgcaaacttttaaatatagtaaaggtaataataaatgagcattaatttactatatctagttctgcagtttctgttcacacacaaacctagttctatctatgcatgattggtctgacaggaatgagaggatgtaggggatgttggcattcctacttcttggagtagtgagagtgtgatcacagtggaaatcttaaccactcgacagtggtgctatccatggagagtagataattcattgaattattcccgttttaattaatcccccaattatccacccagactgattgaagcaatgaatatatcagttgattgtggtgtaacagaccatgttccaaaacttagtggcataaaacaatgatttctttgctcatgattctgttgagttggcagttctggcatggctcagctggaatagccactttggctccttgaggtatcagctggtcttacatctgagtttgcagtcagttagcagattaactgagggctattgggtggggctgttggccagcctcagttctcatccacatggcttctcatctttcagtaggctagactcagcttctttacatgatagtggaaacattccaagagggtgcagaagctgcaagaagtcacataacaacatgttgatcacattgtattggtcaaagctagtcacaagttgagctcagatttaagggatggggaaatagactctatcacttgataggaggaactgcaattaatttgtggctgtgtttaagctaccatggtctcttctctgaccaaaattattattattcctcctacactcactcccctctacgcctcttgaagtatattattccatcatgacctcagggttgaattgatgatctcatggtatgcatcagttctggatacacatgaggctttcacatgtagtaattttgttgcagctcttcttgattgagaaacttgtgaattagacaggttatctgctccgcatatgccctatatacaataatgagataggagtaagttaattgtagtaagaagagggacaggagaggaacatagccatctctcggccatagcagtcctgaaatccagtcagcacatgttgtcatggcccctgttctagggtctgggaatataattatcttctgtgggagtggttccctaatccatgtttctccaggactcttggttccaccctatgaggtgtcttctcttttctataacaattagcccataatatacagctttctcaccctgcttcctgcctgttgaagagtgggcgcccagaggccttttttcattttgagctgtctctatcctatcccttttaggccaagctgttagtattttttaataaccaactttctttaaaatgttgtgagtttcctgtgaatcttagtggggttcactctatgcctcaaaagccacatctataatagcctttgagacagccctctctgctttgtgcagaacaatcccctgaagattcctagtagtacttttgtctaggtgatagggtgtactaggcaccacctaagtctttctggagtcttaacaaagagtattatggccatttaataaccactctttgcctgcaggggaggtggggcagaatgggagcaggctgagcaaactacggcctacaggccaatcctgttgccattgacttgttttgtacaatgtacaagctaagaatagtttttgcatttttaaagggttgttaaacagaagaatatgcaacagagaccatatatgactcaccaagtctaaaatatttactatctggttctttatataaaaaggttgcaattcctggtctaattcaagaaaaactgttagcataatgtttatcactgggaaaaacagtacatataactatcctgactcatcaaaaacatttgataaaaggtctaaaaacaaattaagcttcgaatagaggatttctttcatatacaaagattagaagaaccaattttttttttctttttcgaggcagggtctcagaaaaaaagactctgtcatgcaggctggagggcattggcacaatctcagccctctgcaacctctgcctcccaggcgcaagcaatcctcccacctcagcctcccaaatagctgtgattacaggcatgtatcactatgcccagctaatttttgtattttttgtacagatggggtttcaccgtgttgcccagactgttttcaagctcctgagctcaagcaaccaccccccttggcctcccaaagtgctgggattgtaggcatgagccaccatgctcagatgccaataatatttttaataagaagttctacgtgggaccaatacaagcataattctttattactatttccatttgatattatgttttaaatacatgtagtggtaaagtggaatatgaaagctaaatgtgggaaagatggagaaataaaaatactattttttaaagtaatgtgaacagaaaaatccaagaactcatccagaaaacttttcaacaaagttgtagagtataaggcaaagatgtttgtttttagctgcagctatacagctagaaaagaaaaggaaagagaaagatcctatttgtagtactaatgtagaaactttcatatatgtgtatatacacatatattagaaataattataaaattctgatagaagaaataaaggacttaaatagtccatacacatatattcctgcttatgcatggaaaatcaaatttaattagcatgtcaagatacagatttaatgtaatatcagaaatacctattaggctggatgtggtggttcacccctgtaatcctagcactttgagaggccaaggcagacagattgcttgagcccaggagttcaaggccagcctaggcaacatggcaaaaccccatctctacaaaaaaatacaaaaatcaaccaggtgtggtggcacgtgcctgtagtcccagctacttgggaggctggggcgggaggatcgcctgagcctgggcagtggaggttgcagtgagccatgattgtgccactgaagtccagcttgggtaacagagtgaaaccctgtctcaaaaaaaaaaaagaaagaaaagaaaagaaatacctattagctttccatcacattctggatagagtccaagttccttatcatgtcatccagaagtccttgaaccctagccatctggtgcccatctgcctgtgcagcttcctagacatcagtccggtttgtgatctcagccctttcccctttgactcacttgcccatttactcccatcccaccacttctacttctgaatggctaggttaggcaattagtttaaaacccagtctaaacaatagttatgaaaagggccagtgcctggcaccttgttggtacttgaaatatgtttcttgaatggaaaaatacctcaatgaaagttactttactgtttgttgtttctatggggaattttataaaggtgtaacacagttattttccctgtagaaaggaagacataaagatgtaagtattggctgggcgcggtggctcacgcctgtaatcccagcactttgggaggctgaggctggcggatcacgaggtcaggagatcgagaccatcctggctaacacggtgataccccatctctactaaaattacgaaaagattagctgggcgtggtggcaggcacttgtaatcccagctacttgggaggctgaggcaggagaatggtgtgaacctgggaggcagagcttgcagtgagccgagatcacgccactgcactccagctgggtggcagagtgagactccatctcaaaacaaaacaaaataaaagtattaaataagagtggtatgttattggctgatttctcttgattgggtggtctagaaatagcagggaatggacctgttcatggcatatattgtctaatatggcacattgggaacttcccacttggatgtcatgagggaacacctcattcccctggattctgtgactattgtgtgtacaaaggaccttgggagataaaacttgggagataagatcttggtttgaaatagagggctgcaagttctaatttgccagggtgcccacaaattaagagtaaaggattttatcacttctaaaaggacagaattacaaatgtggtttctttgggaccagagaggataaatctgggaataaatgatacccagatattaataaaaaagtaatgcacccagaggattgaagagaacttccccaatgatgaattgtgtttgaaattgtggtaatgaaatgtgaaggaaagactcgtttcccccagtgctatattgggcatcagggtggtgtgggatgccctcttcaggactacaattccagcagaggggccaaaacccaaacatctgcacttgcctcattctcattctttcaaggcccatggtttgcaagaactaactcacttggtgaaatgggggcaacaggaatgttcttcctttctcttgagggggagaacagcaatcttgggttcgtgtgggaggagaagctccacagaagaggtgttgctgggtctgagccttgaaggtaggtgagaagccctcatctgagtgggaaggaccttgtgtcatgcagagctctgccaggagtcaggaatgcctgtttacgcagcagtggtgatttgccagtatgtggagcaagggctgaattatcagtacagcgtgtccgtagcactttctcagacccttgaggtttctgcaagctccattagaatgctattagttcacctgccaaagataaagactcagattaggaggactctaccggaaagatatgccaaaaattggtttatcttttttttttttaaaagaccatgtacatttttattggcatctttaaaaatgttgaggtatactgagtatgagctatacatggaaatgttatctgtacatctttagttttattatttggaagtaaagcacatggaaatggggcccttttatatgttttattttgcatctaaaatttaaagtcattcatgcagtgaatggttattgaatacccaactccatgttaggtgttgggtggcagaaaagggggtgattgctgaggactagggcctgagccctggagtccatgccctgagagaagactgagaagtatgtttgggaaagtttcccatcatatttagagataaacctgaactcctttatgtggtccacaagggcccattagatctgacactgcctacctgtccaacctacaccctccagccttgtctcctagccctctccctcttggtatgtatgtttcagccactctccttctttcttttttaaaaaaagttgtaatatataattcctaagttaaaataatcatgaaaataatcatgaaatgattaaagttaattataatcatgaagtgacaaaaataatcatgaaatgacaaatttctggaaagatgtacattgcaaaattgacatgtgtgtataaatctcaaaaaatcatcacagaaaatattgtaaaacttacgtattttctccttcaagggcttaagggacaattctattgccagtggattccttcaaactcttaatgaatagatcatttttgtggtaacaaatttttttttttacttttattttaggttcaggggtgcatttgcaggtttgttatataggtagattgcatgtcatggggtttggtgtacagactatttcatcacccaggtaataagcatggtacccaatcgatagttttttgatcctcacccttctcccaccctccatcctgaaagaggccccagtggctgttcccttctttgtgtccatgtgtacccaaggtttagctcccacttataaagtgagaacatgcagtatttggtttctgtttctgtgttagttcacctaggataatgacctcagcgtccatccatattgctacaaaggacatgatctcattcttttttgtggctgcacagtatttcatgatgtatatgtgccacattttctttatccagtctaccgttgatgggtatttaggttgatttgttattgtgaatagtgctgtggtgaacataagcacacgtttgtctttatggtagaatggtttatattcctttgggtatatacccaataatgggattgctgggttgaatggtagttctgttttaagttctttgggaaattgccaatttgctttccacaatagctgaactaacttacgttcccaccagcgttgtataagtgttctcttttctccacaacctcaccagcatgttttttttttctttttttcatttttaatagccatcctgactggtgtgagatggtatctcattgtggttttgatttgcatttctctaattggtagtgatgttgagcattttttcatatgcttgttggcgcatgtatgtcttcttttgaaaagtgtctgttcgtgtcctttggccgctttttaatagggccatttgtcttttacttataaagttgttgaagttcattatagattctgtatattagacctttgtcagatacatggtttgcaaatattttctcccactctgtaggctgtttactctgttgatagtttcctttgctgtgcagaagctctttaattaagtcccatttgtcaatttttgttttcattgtgattgcttttggcatccttcgtcatgaaacctttgccagggcctatgtccaggatggtatttcttaggttatattccagatggttataggtgtgcagctttatttctgggctctttattctgttccatcggtctctgtgtctgtttttgtaccagtactgtgctgctttagttactgtagcctcatagagtagtttgaagtcaagtaatgtgatgcctctagctttgttctttttgtataggattgctttggctattcagagtcttttcttattccatatgaattttagaatagctttttctaattctttgaagaatgtcattggtagtttggaatagcattgaatctgtaaattgctttgggcagtatggctttttttttttatttttattttttatttatttatttttttttttgacggagtctttctctgtcacccaggctggagtgcagtggtgtgatctcggctcactgcaacctccgcctctcaggttcaagtgattctcctgcctcagctcccgagtagctgggactacaggcacatggcatcatgcctggctaattttttgtatttttagtagagttggagtttcaccatgtttgccaggatggtctcaatcgcctgaccttgtgatctacctgccttggcctcccaaagtgctgggattacaggtgtgagccaccatgcccagcctttttttttttttttttttttttttttttttgagatggagtctcactttgttgccaggctggagtgcagtggtgtgatcttggctcactgcatcttcctcctcccgggttcaagtgattcttctgcctcaacctcctgagtggctaggaatacaggcatgcacccccacgcccagctaatttttgtatttttagtagagatggggtttcaccagttggccgggatggtctcgatctcttgaccttgtgatctgcccgcctcagcctcccaaagtgttgggattacaggcgtgagccaccgcgcccggccccattttaacaatattgtttctttctattcatgaatgtggaatgtttctccatttgtttgtgtcatctctgatttctttcagcaatgttttgtaattctcattgtagaaatctttcaccttcctggttagctgtattcctaggtattttattctttctgtgactgttgtgaatgagattgtgttcttggtttgcccctcagcttgggtgttgtcgatgtatggaaatgccactgatttctgtacattgattttgtagcctaagactttgctgaagttatttatcagatctaggagcttttgagctgtcttgctttctatgaaaaagccaaacccattcccagcacttcatatacttgctaggagcccttttcctccaaatcttttcatggattccttcttctcatcaattaagtatctgctcaaatagcccatcctaaatagcctgtctaaaatgttaccctttttgtcactctgtaatctctttcctagataatttccttcatagcacaacattatatctgaaattttcttatttttacccattattttctgtctcctgtgctaggaagtaggcttcatgaggatatggatattgtgttcactacagcatttgaagtacctgacacagtgcctggcctgtttagtagggggatcaagaaatatttgtttaacggataaaagaggaaaatgggcattcagacagtaacacttcagcagggtgtttgctggaatggaagcaaatcaggaacatgaaagctaagtttactaagggaagcaggtagggtgttagagaagtctccccacagaggaactaaaaacctagagaatgagttgcagtttggcagatgggaggatggggatggagaattgcagaaacagtgtatgtgaggaagacctattgggagcacagagaccagtagttttcaggggaaacctttaccagctagatgtatgcggagggctcatgtgtggcagagggagctgacactggacagctcaacaggaatcattgccgtgaagggttttctatacctaaaaaggggtttagattttactaaaccccttttttgaagaattctgagccttttcacaaccaggacaccagaaggagtagtctgaatgtcctgtctttactttctcacttcctttgactcctcagcctattgtaattggagttgcagtcaaatcactccattaaagccgttagttaaggggcattccagttactaaatgcttttcggccatcatgtcacacagtgaaagggcaacagctttggccctgctgactcctttctttcctgaactggtctcttccttggtttctctggttgtacttctctttcttggggctatttttcaatagaagccttttcagccttttctttagcattgcccatctttaagtctttaaagtccggagtttcattcttgatggtcttctattgtcattctatattctcaccctgggaaaattcacatatcttcttgccttccaccccaattactcctaaatcttgttatttacttcatatttttttaagttccagatctatatatttactgtctactaaaaagctgtcttcattaggatagtgcatagacgtctcagactccatatgtctgaaaagtgaatccatcatctttatcccaacctaataccacttgtaaatttcctgtcttggtgaatacattatcagctacctagatgctgaaaccagtaacctgtgggtccttttagatcttttcttttctcccttatgtgccatagataatcaactgcaagttattttagttctaccttacagtttctcaaatatgtctccttttcccttctgttgttggagtacttcagaaagtcatcatctctctcatctggattattgttaccctgcctctaacactgcttccccttccaactaattctgttcagcaaatctgattgtgtcatcatgcgaccccctctcccactgattggtgtaaggcgagaactcaaacttgatttgtcgttaaatcctttactacccatgtcccaggtgtcccaggtctagctctctagctcccattctccttccatacttctgataatgactgctcctttttctgaactcctaaactgaatgcttctaccacccctggatacttactcatactacatgccttctgctgttctttaactgtttatgtgtatgtattttatggaccaaatgaggggaccttctccagggcttggaccatatcctccagaaagggtaagacagtatttttgtggacatagtatgcagtcaataaatatttattggattacattcactaataagtctttctctccttatatattatttattaataatgtcaatttctcttttaaaatcgtctctgagtttttcatttaactgcatgaaggcttcacatttttctagtaactttgtagcattgctttgctaattaatagggcttaacttttcattttcacctagcaaatctgtttcttcataggtaaggaattcttgcaatgtgcatggtggtaataacagctatttttggaaatatcagcaggagtgtgctaaatactgtcaaatactcttagattcttctatcattagaaaggcttataaacttaaaagtatcacagctttaactggattgaagataggttaatttgattcttagcttttcaaatgcagactttcaagaaaaaggattttttggttcagtttaagacaagacattaggaactgatgtgtcttatcgccttagaacatgaaggattcttttgttactgacataggcattgacatgtagagaagaactcctgactcttcttctgtctctccttccactggtatggaagatacctgtccaagaagaaaaggcaacaggtatgctttttccctttatcatatcacttgtgttatcaaaatttcatagaaaagttacttctgcctgaatgtttgattctgattcagattcagaacactatatgttattgtgatttattcatactaaatatgaaaaattatttaggcaaacacatttttccttcaataatacaaaaaccatggtgcttcttgggggaagtacttgaatgtactgatgattagaaaatgtataaagaagcagaaacacttatcagaaggagtgagtctaggtgtgcagcataacatcagaaaaatggatagtgaaaagttggaagtgaaaagtctgaataaagaaattaaagtttctttgcttattttaaagactgctttctattaccagtattctataagtgacttttgcagtatttgttttagcttagtttttctagtgttgcctttaaagtataattttttttttttttttttaggcagagtctcactctgtcacccaggttggagggcagtggagtgatctcggctcactgcaacctcagcctcccgagttcaagcaattcttgtgcctcagcctcctgagtagatgggattacagtcgtgcaccaccatgccagactaatttttgcattttagtacatacagatgggatttcaccatgttggccaggctggtctcaaactcctgacctcaagtaatctgcccaccacagcctcccaaagtgctgggattacaggcatgagccaccgtgcccagcctaaaggatatatttaatattttgtttcaagcttgggtagaattattctatgtaaggtcgatagatatttttaatttatgattttgaagaaatcatatgtctataaagtacatgaaactttaaatgtttcattggagagattaatagttttcctcttgaccctttcttgtgacatgtttgtgagatgtttgaagatctctcaggttaaaaaaaaaattattgtattttaattcctgtatttttagtgaatttcatggagctttttttaaggaggtatctaaggttttgtaatactgtttttctgcttatttattgattcactaactctctgcttttatttttttctgagtttgcagaattcacaaattgttaatcacttaagaaatctgattaatgctctttgggggaagttgtcttcattgtctgcatcttttgcttgggtggaatttgtcagactccttttaatttctcctcttcccatctggtttgctttccctgtcttagtaaagcacagatttttttatttacagattttaatttattcactctaaattacagctacttttttatatagctcttactacatactgcaaagagaaagactgatctaattatctttttagttaaagggagaattcattcatttcccctgtgaagtatttactgagtgttgaccatacgccaggccctatctaggcaccggggatgaaataatagtgtctatacctggtgcctagttcagtgctgaaacatttgagaaataatttgaataaagaattatttaaacctcagttttagagaacatttggcatatagtgtatgattttgaaataattttagaaaaatcttaaagtagttaaattatatcaggtctatgaatactatttttgagaatataatacatccttacattttaattagtggtactatgggaagagatttgtaaatggtgtgaacaacagcactaaataccagataatctacagcatctcttatgttgaagttagaatataatatatagttttaaatcagatttactttcttaactctgttctcttttgtttgttgttgttgttttgagacagagtctcactctgtcacctgggctggagtgcagtggcacgatctcatctcactgcaacctctgcctcccaggttcaagagattctcctgcctcaggctcccaagtagctgggattacaggcgtgcaccaccacatctgactaatttttgtatttttactagagacagggtttcaccgtgttggccaggctggtctcaaactcttgacctcaagtgatcccacccgcctcagtctcccaaagtgctgggattacaggcataagccacctcacccagcctctcttttgttgttttaaaaatcagtttgtatcctttgaagtaatgtcagctagtgtttagagtaagtataggtgtgcctctgttttgttgttttaaaaatcaatttgtatcctttgaactaatgtcagctagtgtttagagtaaggataagtgtgagaggaggtaacccagagatatgacataaatgaaggaaatcagccctgcagcaaaatacattgaggataaactcctttagtgggtttaagataaataagagggctgtcaccttaaaattgagttttaaaacatattgaggtattctaagccttcttttttcattccattagattttaacctaccgctctcagcagatataatcctgaccaaagaaaagaactcaagttcacaaagatccactcaggaaaaattacatttagaaggaagtgccctgtctagtcaggtttctgcaaaagtaaatgtttttcgaaaaagcagacgacagcgtaaaattacccatcgctattctgtaagagatgcaagaaagacacagctctccacctcagattcagaagccaattcagatgaaaaaggcatagcaatgaataagcatagaaggccccatctgctgcatcattttttaacatcgtttcctaaacaagaccaccccaaagctaaacttgaccgcttagcaaccaaagaacagactcctccagatgctatggctttggaaaattccagagagattattccaagacaggggtcaaacactgacattttaagtgagccagctgccttgtctgttatcagtaacatgaacaattctccatttgacttatgtcatgttttgttatctttattagaaaaagtttgtaagtttgacgttaccttgaatcataattctcctttagcagccagtgtagtgcccacactaactgaattcctagcaggctttggggactgctgcagtctgagcgacaacttggagagtcgagtagtttctgcaggttggaccgaagaaccggtggctttgattcaaaggatgctctttcgaacagtgttgcatcttctgtcagtagatgttagtactgcagagatgatgccagaaaatcttaggaaaaatttaactgaattgcttagagcagctttaaaaattagaatatgcctagaaaagcagcctgacccttttgcaccaagacaaaagaaaacactgcaggaggttcaggaagattttgtgttttcaaagtatcgtcatagagcccttcttttacctgagcttttggaaggagttcttcagattctgatctgttgtcttcaaagtgcagcttcaaatcccttctacttcagtcaagccatggatttggttcaagaattcattcagcatcatggatttaatttatttgaaacagcagttcttcaaatggaatggctggttttaagagatggagttcctcccgaggcctcagagcatttgaaagccctaataaatagtgtgatgaaaataatgagcactgtcaaaaaagtgaaatcagagcaacttcatcattcgatgtgtacaagaaaaaggcacagacgatgtgaatattctcattttatgcatcatcaccgagatctctcaggtcttctggtttcggcttttaaaaaccaggtttccaaaaacccatttgaagagactgcagatggagatgtttattatcctgagcggtgctgttgcattgcagtgtgtgcccatcagtgcttgcgcttactacagcaggcttccttgagcagcacttgtgtccagatcctatcgggtgttcataacattggaatatgctgttgtatggatcccaaatctgtaatcattcctttgctccatgcttttaaattgccagcactgaaaaattttcagcagcatatattgaatatccttaacaaacttattttggatcagttaggaggagcagagatatcaccaaaaattaaaaaagcagcttgtaatatttgtactgttgactctgaccaactagcccaattagaagagacactgcagggaaacttatgtgatgctgaactctcctcaagtttatccagtccttcttacagatttcaagggatcctgcccagcagtggatctgaagatttgttgtggaaatgggatgctttaaaggcttatcagaactttgtttttgaagaagacagattacatagtatacagattgcaaatcacatttgcaatttaatccagaaaggcaatatagttgttcagtggaaattatataattacatatttaatcctgtgctccaaagaggagttgaattagcacatcattgtcaacacctaagcgttacttcagctcaaagtcatgtatgtagccatcataaccagtgcttgcctcaggacgtgcttcagatttatgtaaaaactctgcctatcctgcttaaatccaggtttgtatgtgtgtgggtggcggcgggggcgggggttgttgagcatgtctagatctttttcattggatgctttcaagtgagtgataaattgtatgcatttaaacttctaacactgatatctccagggctttggcagcagtgtgatcgtatttactctttattctttcctaggatttaatttcaatttgtcaacaaaaaatgttctccttccatgtcagatttgttttaaccatttgtttatgtatgtatgcattttttactgagctgtttatagagaagaggatacagccattgattttaatttctcaacaaaaagaaaagttttagatatacaactgagaaaaacgtagatgaaacacagatatccaagagcagggcaagtttaattactttatatttccttgatagaatattattggccattgaaaatgtttacaaagatcatattggaatatgagaaaatgattataatatcttatgggtaaaatataaacaattaaaatagtgttcacttatttacaactatgtaaaatatgtattacatgtaaaataatacataaaatgattattgaggcagaggcactaatgggattattaattttaaaatattatatttacatttataacctctgcaatatatgtagaaaaattagaaaatatagataaacaaaaataagaatattaaaattacttttaatcctatcagtgagttttccagactttgtgattgccaaatctggtgcatttaaaaataattttataaacgaatgggtagactggtctttcaaattaatgcatataccattttagaaacttatacaaaaataacctatcaatatcttcgtgtgtggcattttttggtcaatcttagcacaactactttaaaactattattgatgttaaatcaatgccttacagtcatttaaaaatttttctgacattttggcattgtttaactagaactgactgatttgaaagttttgtaactctttggcgtattcgtggacaacctgaatctttgtgatgaaagggctgagaatcacctagctggcttatattaaagttattactaggattccaatgatctagacacaagtctcacctgagacagagctgaaaaacttttataatatttgtaccattgactgttcaattagcccaattagaagggaaattcatgtgatgctgagccttccgtagattttcagctctagtgtgattctttcccttcataaggtatagatttaaagtaaacaaaaattcccaagtgaaccatcaggcggacaaactaatgaacaaacacgtgcttgcctgccctcagggtgtccacctcaggtgtggtggtggctgtggtgttcagaatttatatagaatttgccatttggagaaaaatattcttccctgaattgcttcatttaatgtgggacaggcaatcttttctttttagatactgctggagccatatatacaaatgtttgaagaaggatatcagagtaattagaaagtaacttgaggtcctaattatatctaactaagaactttagcctgataattgatgaataaaattaggtagtggttagtatatcccacatgcaatagcgatatattaaatattatatgtacctatttataaatgatgtttctttatttaaacctttttacatgctttttttctttcacagggtaataagagatttgtttttgagttgtaatggagtaagtcaaataatcgaattaaattgcttaaatggtattcgaagtcattctctaaaagcatttgaaactctgataatcagcctaggggagcaacagaaagatgcctcagttccagatattgatgggatagacattgaacagaaggagttgtcctctgtacatgtgggtacttcttttcatcatcagcaagcttattcagattctcctcagagtctcagcaaattttatgctggcctcaaagaagcttatccaaagagacggaagactgttaaccaagatgttcatatcaacacaataaacctattcctctgtgtggcttttttatgcgtaagtaaagaagcagagtctgacagggagtcggccaatgactcagaagatacttctggctatgacagcacagccagcgagcctttaagtcatatgctgccatgtatatctctcgagagccttgtcttgccttctcctgaacatatgcaccaagcagcagacatttggtctatgtgtcgttggatctacatgttgagttcagtgttccagaaacagttttataggcttggtggtttccgagtatgccataagttaatatttatgataatacagaaactgttcagaagtcacaaagaggagcaaggaaaaaaggagggagatacaagtgtaaatgaaaaccaggatttaaacagaatttctcaacctaagagaactatgaaggaagatttattatctttggctataaaaagtgaccccataccatcagaactaggtagtctaaaaaagagtgctgacagtttaggtaaattagagttacagcatatttcttccataaatgtggaagaagtttcagctactgaagccgctcccgaggaagcaaagctatttacaagtcaagaaagtgagacctcacttcaaagtatacgacttttggaagcccttctggccatttgtcttcatggtgccagaactagtcaacagaagatggaattggagttacctaatcaggtaataccttgtccttagtccaactcttatgtaatatatatacatatatatacacacacacatatatatataaaaaatgtaatatgtattacataatatatgtaatatatatattattgtgttatatataacatataatatattacttttatatatgtgtatatattatgttttatgtatatatacacatacacacacacacattttataagtgtcagatgaataataatggatattgtgtttcaaagttgaaagatctaaatttttgtgtgatactgttggctgccctgcccagaactcctttaccaaactgatcacccattcaccatctgcgcatcagcacccatcttccaggaatcacccttgaccgatggaagatgcctgggaaggatgctcatagctaatgctgatagatgtggctctaagaagtggggacaatcattgtggggcacttcaggctccagagcttcccaggaaatgaggctgggacgagacttctcctaaaaccacatctttgtccagattcttctcctaacctcttctgctttacctcacattcttacaagttttctcctgagatcatttctcaactaaaaaggaatctagggacctggaatatggcagacctcttctgtcctcactaacttacacctaactgttcagtcagccaacaggctcttcctacttcagttccagcctccatgttgccttatctctaaaaaatcctgatgcttccacactgaatttccacaattgaaattcacaagctttaacacagcacacaaaactcttcagtcttgctttgacttcttcgcttagcttcatttcttgccattctttaccatgctgcaatgaaaaccaaataagatgaactaagtattttatcaataaaaatgttattaattttaacaggatgtttgtatagagctagatatttatatagtcattttgctttcatatcaactgcaaataaatggattagctttatacttaagtaaatatttattatttattttttcatcatttagttttttaaaatggttattaatattcttagtctcttttattttaccttagaacttgtctgtggaaagtatattatttgaaatgagggaccatctttcccagtcaaaggtgattgaaacacaactagcaaagcctttatttgatgccctgcttcgagttgccctcgggaattattcagcagattttgaacataatgatgctatgactgagaaggtatgaataacaacatatagttgtgttctttgggtatgaccagcagaggcggaagtgtgggatgacactaggacgctgatgaatgtcattagagcatatggactaggacttggtcagatgagttcagtggatcttatctcctcgtgatggatatgtgatgggatggacagtattttgtcattgccctgtcttatacataacaggagagtgatatgataagcttttccttatctaatctggaaatttactgagaattacttcgagttaagacagaaatatattacttgatttggtatattttacatatacctgatagtgtattaaatgctaattcagggatggtggtgatttacctatcctatctggttctttggtggtatagctaatatttccagaactctctactcacattaattttaaatcattcaacataaaaatgactagtgcctacatagaaaatagcagtcacagtgttttagttgtttaacattttttcctaaaacaactgttgtaattttctttcctaaaattatgtggtacataattggcttgtttccctctcattttatgtttattttacctttagttgccatctgtcctttattttttatataacttctccttttagctccttgatctagccatatatataatgttttataaggttttgaaataacattttatgttactatttgccataacttaaaaacatgctgaaatagctatgaatacgttcatcatattactgaattaattgactaactgtaaaatgttaaaatacctactttattctaccttttattgttgttacaatgatgaagtattctgagcttctttaagtgaaaatgttttctaaaatgaaggtattagtggaatttttataagaaaaggaaaatttctttcttacacaggaagttagtactggaactcttgacttctgagatgcttgttatgtagacagttgcattctgagatcttttaattaatccctttgaaaaaaatgtcttgtctgctctagttacctaacttataaggcatttataaaaatccttatgaaaaaatcttttttattaacaaatgtgcacaaataatatatattagtattaaattgtatgaagtaaaattttaccacattgtggttttttgtcatttccaattgtataactagaatgaaatttcttacatagatttatttattaaactgaaatgacctataacttactttgttagaaaccccctttttgaggtattaagttgtctgaaaggatctgggaaattttgctgagtgaatttcataatttataatgattcatattgtttactaagtttttttcttcaagaaaatattgaaactgtccttaacatgacttttgagtaataagtattctattactaaaaacaagcaaatgttacaacctttgaattacactgatttatagagtcatcaatctgcagaagaattgtcatcccagcctggtgatttttcagaagaagctgaggattctcagtgttgtagttttaaacttttagttgaagaagaaggttacgaagcagatagtgaaagcaatcctgaagatggcgaaacccaggatgatggtaaaatatcattgaagtgcttgtaattagatctgcaagccagatcattaaatagcaaaatggttcataataataccactttagaattttgtattgccttacagtttaacaagtgtgttgcataatctttttattgatcttcccaacagtctggcattcatatatgcaacaatgtgatatagtttgttatcacaaacatcatctgagtggttaagaacatggagtgaaggacagagtccccaatttcatgtatattctagtgtgaaagacaataaataccagaaatagataataaaatagaaatcgataaactgggtgatgtcgtattagtaactgggtggtgagggaagtcctttctgaagaggcaatgtttacattgaggactaaatgaaaacaagctaggcagacaaacactggcaggaagagcattcaggcagtttgttataaagaatacataatacaggaatgcagacacctgtctgtgacagccaagcatagatttcttcttagtttaccacagctcaatttgtctttaggatggaactatattgcctatgatcctttcctcccttgtctttggacttaaaatgagtagaatggaaaagatgggttgattagagccaagagacttctggcaagactccatctttttatatgctgaccttgtgagtgtcccagtactgctagtttttttttttttttttttttttttttgaaatggagtcttgctctgtcgcccaggctagagtgcagtggcgtgatctcgactcactgcaacctccatctcccaggttcaagctattcttctacctctgcctcccaagtagctaggatttcaggagcccgccaccatgcccagctaattgttatatttttagtagagatggggtttcaccatgttgcccaggctagtctcgaactcctgacttcgtgatccacccgcctcggcctcccaaagtgctgggattacaggcgtgagccaccgcacccagccactgctagtcttcactgagttctcagtaggatatcttcctcacagtcagttttctcgctctcatctagtgaatgggaataatcactgatatcttacttaaagggcttgatggacccatgactggtgctttttgaaaaaatattggtttattaatttttttatagtacagcttaccatagtacagatttgactttataattttggatttcctccttttttatgtttgctaagtagatctcaacttaaagaattctgatctaggtagaaatttataaatttcttaactgtatcaacattttattaagagcacagcagtcttaaaagatcatataagtcaaattttccaaaatgcaatattcaataagacagagtctgtttctcacttatgaagaaggcaaaattgatcattcttccaaccactagtcaagcctactattttcacaaagatttgggtaggcaaattgaactgctctgtgatttaggtatttgaggggggggtcagaaagtttgaataggttttttttttttaaagttgtgtccatgggatgtgttaaatctctatcatatgtctgtaaaaattcttatttgtaaaatttgtagttctattgaagatgaaaattgcttttaagggaactcattaatcttcaaaatttccatatcattgtcaaaagttgtgttataggaaaagattggaaaaggttttgtaagcatcctctgaattactatttttgccactagatcttctaaatgattaatgaagtttgaaatatttagtgtttagggaatacaagtaatctttcgcttttctcttttcaggggtagacttaaagtctgaaacagaaggtttcagtgcatcaagcagtccaaatgacttactcgaaaacctcactcaaggggaaataatttatcctgagatttgtatgctggaattaaatttgctttctgctagtaaagccaaacttgatgtgcttgcccatgtatttgagagttttttgaaaattattaggcagaaagaaaagaatgtttttctgctcatgcaacaggtaaaaaattcatttagttaaatgtgatcaatatttatcagactcatcacccaataacatctccttatgtataacccagcttttctgaaaattatttgagatgattacttatcttttctggtacctcaggtgaatacctacaagtggtattccaaaatcttctaattccatagttttctaaagtagcatagaaaattaatgtcctttgctagccagtagtaaatcctcatctatttctgagactgggtaatatttttaaaaatgcatttaattttaatacatgctcgctgttttgaaaaatcaatcagtataaaaagaaaatgaaaattagtataatcctacacatagtagtctttttagtcatttttaaatacatatatacatatatagtagataccctatcatagaatttattatgacattgcagttgtttcatgcttctgtgaggtaagtaatttaattttgtattttttttaatcttcagggaactgtgaaaaatcttttaggagggttcttgagtattttaacacaggatgattctgattttcaaggtaagttgaaactgttttaaacaatagctctgaaattattttatgtgaaaagttgataataatggcttctggccaggtgtggtggctcatgcctgtgatcttagcactttgggaggctgaggtggcaggcggatcacttgagcctgggagttcaataccagcctgggcaatatagagagacctgtctctataaaaattagccaggtgtggtggtgcatgtctgtggtcctagctacttgggaggctgaggtgggaggatcgcttaggcccaggaggccaaggctgcagtgagccatgatcatgccactgcactccagtctgggtgacagagcaagaccctgtctcaaaaaaaaaaaaaaaaaaaaaaaaaaaaaaaaaaaaaggcttccattggcatagtgctctgtgatttcaaaaaagtgtctttatatgcattatctcgtttgttcctcagatccacacaatgaaatagccagagtgcaagtatgtttatagagaggaaaatctagattccaaggggttgagttgttcagggtcttatacaaagaagtggcatagtggggactgtaacccagtctaatgccatgttgttgccatatctggtattgattaatctgtacttggtacttctcagacatttgagaaattcataatgaatgtataatatgattgctaatcacaagaaatctaaattttagttggagaattaaggctagcctacacgagactttaattttggtttgtatgatgttttctcatgattaaattcaggttatacgtttttgtcaggaatactcagaagtgatattgggtccttttgagtgcatcatatcaaaaggacttatgatatctggatcttactactggtgatgttaactttgatcatgtggttaaggaggtgtttgccaagtttctctattgtaaagttactattttccctttataattaataagtatcttgtggggagataacttgagactatgtaaatgtactttttctcattctttcatccactaattttagtattatgaaaaaaatatgaaagtatgatgattcttgactggaacagttaattctgtggtatctgccaaatagtgattttctgtttccatcattccttcatttattaactgagattgtactgtaaggaaaagctttctcttctcattcatttacttatttagtatatgggtgtatttttattattttgctagacacttagtgaacccttgtgatctgaatatgtgtttttaactctgagaaattatatgccattatttaatgacaggtttattgggatataattcccataccataacattcacctatttaaagtgtatagttcagtgttttgtagtaggcagtttatttacagagctgtgcaaccatgaccacaattaattttagaacattttcatcacccccaaaagaaaccctgtaccctttagcatttattgcctattgcaccttaaccctcccctgcacggattcttctgcccctggcaatcactcatctacttccttttctggatatttttcatataaatggaatatgtggtcttttgtgactggtttctttcacatagcatgatgctttcaaccttcattcatgttgtagcatgtttcagcactttagttctctttctaatcattttttaaattttttactttgcatagattccttttttcagtgttttttttttttttttttttttttttttttttttttttatgacagggttttgcccttgtcgccaaggctggagtgcagtggtgcgatctcagctcactgcaacctccacctcccaggttaagcaattctccttcagtttttattaatagactttattttttagaacagctttagatttacagagaaattgaacagatattataaagagttcccccattacacccctccctgccagttttccctattattaacatctaattttttatgatatatgtattataattaatgaacttatattgatatgttattattaactgaagtccataattcagatttcttaaatttttacttaatgtcctttttctgttcaaggattttatccaggataatactacataatagttagttgtcatgtcttcttaggtacctcttgactgtaacagtttctcagactttccttgtttttgttagccttgacagttttgaggggtactggtcagaatgtccctgtatcagaatttgtttgacatttttctcattgtgctatcttgtgattttgatttgtatttccctaatgattagtgatgttgaacctcttttcatgtacttattggccattcgtatatcttgtttgaagaaatatctattcaagccctctgcttatgtttgaattgggttgtttctttttttgttgttgaggtttaagagttctctatatattctggatattgatttcttatcagatatgtgatatgttaatattttctcccattctgtaggttgtgtttttacttgttgatagtatcctttgatgcacaaaagtttttcattttgaagtccaatttatctatttttttatttagtttgctgtacctttggtgtcatatctaagaaatcattgacaaatccaatattatggaatgttccccgtaagttttattcttaggtatatatagttttacatttagatcctgaattcattttgagttaaattttgtatacggtgttaggtaaggacccaactttataattattattattattttgcgtgtgaatatccaattttctcagcatcgtttgttgaagagactgtccctcccccattgaatggttttggcacctttgtcaaaagtcatgattatgctaggggtatggacttttgagaggaagataatagaaacaaagtgccattgtcattaaatcatatcaagggtacatattgtcaacatgatttataattgttgatgttgaccttgatcacttgcattaagtagtgtttgtcaggtctctccactgtaaagttacttttccccttccctgcttcttttcttttttggctgaaataacattccattgtgtggatatactgcatttgatttatccattcatcagttgatggacatttgggttgttctccttttttgctactatgtataatgctgctgtgaacactcatgtacaattttttgtgtgaacatatgttttcatttctcgagtcatttattttgtgtcatatggtaactctgtgtttaatcatttgagaaattgacagactgttgtccaaaatggctataccattttatattcttaccatcagtgtataagggttctaatttcttcacattcttgccaacacttgttattatatgcctttttaattatatctatcctggtggatatgaagtggtatctcattgtggttttgatttgtattcccctgaaggctaatgtattaagtatacctttgtgtgtgccttagtcccatttgtgctgatataatggaataccacagactgagtgatttgtaatgaacagaaatttattttctcacagttctggagactgaaagtccaagatcaaagtgccagcatctggcaagggtcttcttgctgcatcctcacatggcaaaatgcagaaaggaagagaggcaaaagggggctgaactccccctttcataagggcatgaatcacacccatgagggcagactcctcatgacccagtcacctcccaaagatcccatctcttaacactaccacaatggcaaccaaatttcaacttgagttttggaggggacagatatttacaccatagcagtgtgctttttagctatttgcgtattttctttggatttcttcagagaaatgcctatccaaatccttcagccatttttatactggtgattcatgttttgattattgaatagtaagaggttttttttatgtattctagatgcaagttcctcatcagatatgtggtttgcaaatattttctcccattctttatgctgtttcttaactttcttgatggtttactttgaagcatgttttaaaagatttttatgaagtcctatttgtctattctatctttcattgctttgcttttagtgtcatatcttagatctaatacaggattataaagatttattattttaaaaaataagtttctcctctccatattccctcctctttttttgtattctaattgttatcttgagcctcccaattgatcttgcaaagataagattatctttcctgtcatattgactacatcactgtttttgtgctacattttgagacattttttcaatcccaaccttttatttaattttttatttcggtaattttaatatttaagagctcttttttgattgttttctggttatttctttttcatataaggatataatatctccttgtatatatttgattatagtaataaacatcttaaagtttcttctgtccccaaattatctctttttcctctggggtcagttttgtctgtttttttgttttttaaatattatttttactgatttaggttgctaattctctaatatttttatgaacctttttagaccatttatatttaataaaactgttggagatttcctctaatattgtgaaagtgaatttgttttctattttggcctctttcctgagtgggtagtatgtggaagagctctgtgtgaatgtgccattggatgattaggggcttcccaaacaccctaatgaagagagctttgctttgggggaccattagggatactattaccctacatggcagtttgcataccttagaaaaatgcatctttcacatatagggcttggctggcgtatagtgtctttgcactgagaaaaaaggcatccctttcttgatccaggcatcacagcccaaaaccaggatgcatggcttggcatacagcattcagactttattttagtctctacttttccctttggttaggcagtttgttcagtctgcagactgtacagttacactcagtagccatgatgctaaaagcctgtatacacctgaccatttcgtttatttagagaagagttatcaggtttgggacctaaaagtgaatactgaactatctgtgctctgtactgagaaacaggagagaggtggatattcacagacagacctttcgttaatccctgtattgtcggccgcactgtcactttctctccagaccttagatggacagctcggcttcttactgctctgaacctctttgtaattcaaaggaattctaggttgcagctttctcttatacatctacttttccatcttcaagaaatatttttaaatctcttactagatgtgccccaatgcccactgcccccacatatttttgctgttacggatttcttccttcttataattctgtactttaatgctatgagttttcagtagtacacagaagcaagtgtatatatccatttccccatttttaactggaacctctcagttttgaactggaaaaaaaaagtaagcacacacactgatcatattattttcctacttaaaaacctttaatggattcatgttatgtacaggataaagtccatgctattttatagtctcattgcaagtagtctctccagatgtatgtactattttgctactgtgtcaactcattgcttctacaaaatatgttgcttaaatatggcttctattctctaaactccaggtcttccaaaactaccagtcttttaaaacttatctcaggttttaaatcaagattatttctttcaggtcaaagtggagataatatttattttctagggttttttgtttttggtgaggatcagctgaaataaagcatgtaaaaatactttgaacactataatttgctctacaaatattagttattattttgctccaaagaattctatgaatttgtatatcaccatttatgttttatgctaaacctatgatggaataaagaaaatgttcaaactaaatagtttgtggtatttaagtatttaaatcatctttaatatttccactacttgtcatctaatttcgtacttaaaaagtgatagatataatttaaacattttcaagataagatagcagactattttatgatatagaagcattagcttaacaaatattatattgatttatgtttctttaaagaatgcccttagtttacttgtagctaattaatcttcaagaaaagtgagctcatgctggccagacatggtagctcacacctgtaatccctgaactttgggaggccgaggcaggtggatcacctgaggtcaggagttcgagaccagcctggccaacatggtgaaaccccgtctcttctaaaaatacaaaaattacctgggcatggtgacacgtgcctgtagtcccagctcctcgggaggctgaggcaggagaattgcttgaacctgggaggtggaggttgcagtgagccgagatcatgccattgcactccagcctgggtgacagagcgagcctctgtctaaaataataataataataaaaataataaaaagaaaagtggtttttgttgtttttgttggttggttgatttacatttagttatattgctatttcttcagcaaattttgtgattcctatactagattttttataatccattcaaaaagtgacaatagtattttacctcttttggtgaaattgctcatttattcctctaattgtgtactagctttaattttttccctctttctttaatttagcatgccagagagtattggtggatcttttggtatctttgatgagttcaagaacatgttcagaagagctaacccttcttttgagaatatttctggagaaatctccttgtacagtaaatatgctataatttttacatttttcactgataaattctttcacttacaatttttaatagaatgtatttttaattatttagaaatgttactaagctctttcttttgatgtgacagttggtataggcaatttcatgttattatgtgtgaaatactcaattatttgcatatattttaaccatttcacttcaatttggattaaccagacatatcgctgagattatattttctttacccaccccatccccagtttttgtgcttcagaaaagctgaataattttaattactaaagagaacttaattatgaatagttacaaccatcttagggattatccttttcaaaaggttattatccactatactcttcaattattgtctatgcttcccctttccattggtgtggcttagtgtcttttaaactattatctgctaggaaacccatttttataatgaaaccttgactagaagcataagcaaataagacagaaaactttggagctactttgtagtgggattggatgttccagagaacatctaaggcagggcgccatggctcatacctgtaatcccagcactttgtgaggcctaggtgggcagatcacctgaggtcaggtgttcgagaccagcctgaccaatatgatgaaaccccgtctctactaaaaatacaaaaattagctgggcttggtggcatgcacctgtaatcccagctactcaggaggctgaggcaggagaattgcttgaacccaggaggcaaaggttgcagtgagctgagatcatgccattgcactccagcctgggcaacaagagctaaactgcatctcaaaaaaaaaaaaaaatctaaacatgaaacaaattaaccacaaaagattacatattttaagaatgaaggctgggcatggtgactcacgcctgtaatcccagcactttgggaggccgaggtgggtggatcacctgaggtcaggagtgcaagactagcctggccaacatgatgaaacctcgtctctactaaaaatacaaaaattagctgggggtggtggtgggtgcctgtaatgccagctactccagaggctgaggcaggagaatcgcctgaacctgggaggcggaggttgcagtgagccgagattgtgcaactgcactccagcctgggcaacagagtgagactctgtcttaaaaaaaaaagaatgaaatctgtttcatattttatctcagctacgagaaaatgaaagttttaaagatgtgggagataggaaggtatttaaataggaatgctgatatgtgtgggtatgtttgtattttcatttataacctaaatttcaagattattatgtactttattacgtgattagaaagtttcatttgtttttctttttctctagaaaattcttcttctgggtattctgaaaattattgaaagtgatactactatgagcccttcacagtatctaaccttccctttactgcacgctccaaatttaagcaacggtgtttcatcacaaaagtatcctgggattttaaacagtaaggccatgggtttattgagaagagcacgagtttcacggagcaagaaagaggctgatagagagagttttccccatcggctgctttcatcttggcacatagccccagtccacctgccgttgctggggcaaaactgctggccacacctatcagaaggtttcagtgtttccctgtggtttaatgtggagtgtatccatgaagctgagagtactacagaaaaaggaaagaagataaagaaaagaaacaaatcattaattttaccagatagcagttttgatggtacaggtatgatgacaggattatctgatttgtacacaaagattgttttcagactataattttccttgagccgtaaaaatgtggtagtgttcttaacactcttaacatgttcttcaccttaaatgccttacttagtggtggtaggtcctgacttatcaaagcatgagttgtcataaagccttgaatctctattacggaaactttagttttttataggggtgaaggggacaccacatatacaactttttctggggtcatcagcccctaaagttccttatgtgacttctctcctggtcccattactggattagggtggctcctgatgttataaaaggataaaaccttatagctgcctttctttctgttgtttcccagcccctattagacagtccccatttccttttctttctctctctttttttttgagacagtttcactcttgttgcccaggctagagtgcaatggcgcgatctcggctcactgcaacctccgcctcccaggttcaagcgattctcctgcctcagcctcccgaatagctgggattcaggcgccagcaatcacacctggctaattttatatttttagtagcgatggtgtttcaccatgttggccaggctggtctcaaactcctgacctcaggtgatctgcccacctcagcttcccaaagtgctaggactgcaggtgtgagccaccacacccggctaattttgtatttttagtagagacagcggtttctccctgttggtcaggctggtcgcaaacttctttctctcttttatttcaagttctccttctcatgccatgtcttacctcagtggccctcccctagttcctgtcacagaatgtttaaatgcatcagccattctccaacattagaataaatttcattccagttccttctttaactgaagaattgctattatactgcatcttgtttctcatatgactagggcagaaaaaaaactgttcattgaaaagcaatttatggtgatggaaagtgaagtaggtaggataattcttagggcctgtggaatgaatgaaatgactggatgagacagatgtttagggttttatatgtacatggagatgcaggcctcagtagctcttcattccacaaatctttctcatccagtggaacctctgttttaggacactatgccttcactagaattttctgttgtggattgaattttgccacctaagaactgatagctctacatgtgataatatttattatgctatctaatgtgcattgagtgctttctgtgtatgtgtcactttgctcagctggttctatatacatttttaatcttaacaagttagtaagtgctcatactatctgtatttttagaggaagttaagtagcatgaccaagttatgtagctggtaagtgatggaaaggaattgaaacccacctgtttttaattccagagccttaacattgctactatactataagctatgcagattgctttctcatgttttaatggaggcaatctcaatgtaaacagtctcttataaaatgaataaatatacatagtgacctgagaaaagtaaatattggaaagttttttcttaatttttattttaaggatatattagaaaacatattttagaaagatgattttgtataaacacttaaaaatagtagacatatataaaaagttttgaagagagataaagaatattttgctgcgatatcataccttttacctctaaactaactggtgcctttgggcaaattaacctctcagcacctcaattttgtcaccctatatatatttaccttataagatggttgtgagcattaagttaaatatttgtaatattactactctataattcctaggtacacactggttttgtcctactcttttatttgcagaagttcatatttggtatggaacatttttaaaatttcacatcagatgtgagttctctgtatatcatatatcttggtcagcagcctcaaaataatcagtgaccttaactcttcttttttaaaactattgtcatcgctacagggagtatttttttaacatcggtcatggttttacctgttgaaaaatagcaactaatatgtatgcagtctaataagcagtagtgttctttaaaagtctgagcctttggacatgtattttggattttgatatatcataacatagctttacataaagtcacatgtattataatgacaagtagatcatcatacatcttcaggcagtgctgggttttcaaagatgaggaagaggagtcaagataaataaccagatagcccaagcctgtaagcatttaccctagcttgccttaaagaaacattagagtttcagaatcacttagcaattatatgcaaaaactactcaccagggaatataaattatgaatatattcaaacactagagtttttccttaaaatttgtaatatgatatttttttttaaatcatgccatattgtgataattctagaatgagttttggtagtgtgaggcatggacaatgatgtgtgctccctggaccagggtcagtgaagtcatagttgataaaagaagcttggtacacattgtaataggttgtcacatagcggtctggttacgcccacaattgtcctcagttattatacattttttaatatctaataacttttaaagtactgaattaccatttttcatccctcgtgcttttttggagttaacatctatactctgaaaatatggttgtttagaacaggtcaggctcagacattctgggtagataacctactacaaatgaacaaatttgctttgtattcttctaaattcacttttctactcagttgttacgaaccattttactgatcattctaacatctttttcttatagagagcgacagaccagaaggtgcagagtacataaatcctggtgaaagactcatagaagaaggatgtattcatataatttcactgggatccaaagcgttgatgatccaagtgtgggctgatccccacaatgccactcttatctttcggtattgattatcctcagcctcccatgaatagataatgtatttaaataatttgtgtaagagacattaatgtgaaatctactaataaaagttcattatagcaaaacaaaaagtctcatttaaaaatatatacattctaacagctattaataccacttttataatagtgtattattctatccaaaaatccataaagtctaaaatatattaattctcggctgggtgtggtggctcatgcctgtaatcccagcactttgggaggccaaggcaggcagatcacctgaggtcaggagtttgagaccagcctggccaacatagtgaaacccaatctctacaaaaaataaaaataaaaacaaaaaaacaaaaaaccacaaaaattagccaggcatgatggtgcatgcctgtagtcccagctacttgggaggctgaagcaggagtatcacttgaatctgggaggcagaggttgtagtgatcccagatcgcgccactgcactccagtctgggtgacagagtgagactctgtctcaaaaaataaataaataaataaaaacaaaaaataaatgagtaaataaaatacattaattctctgtttgattttagatcaaatactgaagtcttatgctatggaaatattctatcagattgtaatggtcttaagatgttattaacagacataagttttccatgtgcattatatatttaatagcgattacctaataagcttgggttctccttgttatcttgtccttttatactatctcctttattaagtagtatagatacaggtcttttatttgtattgagtatgaatagtatgatactatttgtctaaaactcaaatctaaacaaaccagtatgttatttaggaatatatactttgtaaacgttacaaacattactaggtgccttatgtacattatctcctcattctttcagtaatcccacaaagtagattagacctccaatacttagacatttatattaatttttctatgaaccaaataatacattgtaatttctaaatgggcaatggctatataaatagtaataatatatatttttttacaaactgaattctgaacattattgcctaaattatgactaccagccaatgagcctaatctattttagttcatgaattgaggtaatgatagaataactaagtaacttatggtataaaacgaagacctactgacttttcaagcactttaaaaaaaatagaactgatttttaatcttacttatttagaattatagttactatatgtatgttaaacactgaggtcagaattttcatgttttcagcctatgccttttctctttttctgtagtgtgtgcatggattcaaatgatgacatgaaagctgttttactagcacaggttgaatcacaggagaatattttcctcccaagcaaatggcaacatttagtactcacctacttacagcagccccaagggaaaaggaggattcatgggaaaatctccatatgggtctctggacagaggtaggaagcattttgagaaaatgcatctcaatctcagttacaatgttatgtttcattagtcaattatagcttctgaaacagaatacagaaacttctaggtttttactataataaaatttactatattttttgttgtttctttttttattattattgtactttaagttctagggtacatgtgcacaatgtgcaggtttgttacatatgtatacatgtgccatgttggtgtgctgcacccattaactcgtcatttacattaggtatatctcctatgctatccctcccccctccccccaccccacgacaggccccagtgtgtgatgtttcccttcctgtgtccaagtgttctcattgttcaattcccacctatgagtgagaacatgcggtgtttggttttttgtccttgcgatcgtttgctgagagtgatgatttccagcttcatccgtgtccgtacaaaggacatgaactcatccttttttatggctgcatagtattccatggtgtatatgtgccacattttcttaatccagtctatcattgatggacatttgggttggttccaagtctttgctattgtgaatagtgccgcaataaacatacatgtgcatgtgtctttatagcagtatgattcataatcctttgggtatatacccagtaatgggatggctgggtcaaatggtatttctagttccagatccttgaagaatcaccacactgtcttccacaatggttgaactagtttacagacccaccaacaatgtaaaagtgttcctatttctccacatcctctccagcacctgttgtttgctgactttttaatgattgccattctaactggtgtgagatggtatctcattgtggttttgatttgcatttctctgaaaaatttactatactttaacttacaaatctgtcagagttggacttttttttcctattggtcattttcatgcaaaataagcctcctgtcgaagtgactgttgaaaattaatatttgggtttggggagcatgcagatacccagaaatttagacatttatgtataactatatatcaaagaacagaatctgtaatttcatcctgcaagcccatatattataaaactgaagccgtgataattatttaaattaagtggctaataaggctaatacctaaattaaattaggctttcaaaagaaattagaatgactagcctatgtataaggtgatagattcagatagagtgctagaaatataccaagtgatagattcagggagagtactgtatgatttttaccacataggagaattgtgagccaagttaataagaaacatcttgtggaatatcttaatgtcaaattttagcctgtaggaactataaggtatcttcgatttgtaagcattgggaagtattgtattgaatgaagtagcatgaaagaagatagagaattcgaaactgtaatgtagcatggtagaggattaagctggttggatgagtttaagttgaataatgagaaataaaaatgaatggacatggtgagactacttaacaggctttgaatgccaagctgagaagtctagatttaatcaaagggaatataatactgcatacttactatgttgcagaccttttgctaggtgctttatatacatcatctaattctctcaaaaatccctcaaagtagattagaccatggaaataacatatacccttaacacagattaacctatttttattcattcatttgttcattcattacatttattgaggaattacagtgttttgagcacttgatatattaattaggcctaggggacaatggtaaacaagatagacacattccctgccttcctggagttcacagtctgatgaggaatcagacaacaagcaaacacaattaaatgaatatttacaaatgatgaaaaatactgtgaggcccatgctttaaaaccctgaggcagaaaatatcgagtttgacacttacgatgggtggatcagggaaggcctatctaagaacagggtattaaacctgagacctgaaggaggagatggaatttgccctgtgcaggtgggaggaggacagtttgaggtggaagacagggcatcactgcaggaggctgcagcaattgattgcttacagctgtccagcctcaataatagagggagacagggagcaggagcttgtggattgctttacagtccatggtgtctgccacaagcaagaacatgctttggaagtaaaattaagagttcagttttgttgtattcattttaaaaaatgtaaaaatacgtaattgaagcctaatttccatgttccatgttccaaataaaatactgtctgtgacgttctcgatcttcatagctgccatggcagctgtagccaatcagcaaatttgtttccagaacctatagttaaatcagatggagctggggctggagttgtaagtagagagcccctttctcctaggcactctccactcaatttcttgagctctcaatatgtgccaggcactgtattaggcactttatacagattacctgatttaatcctcccaacaatactataaagtaggtatattattatcccaattttacatatgaggcaactgagacctagagtgactttcccaaactcatgccacaagtaaggggtagagctgaaagtttaacctaaactctgaccctagggagggcccatgctttaaaaccctatgctttactgcccctgcagcctttttctgaattatgtcagctgacaggtagaggaaccataaactattagaaatgttcagaatgagagattagatttttattgtggacagtctgaaattagtaagcatggtcacttgattcacatatcactctgtttttttacccaccaacttacagctatactcctttgagagaattgtttgccatttggcacaagttaatttcattggttaacagagcaagtgaccaaggacaaatattttattctgttgacttaaacttggttctctagtatctttgtcactttataagctatagaataatttctaggccaggcatggtgcttcatgcctgtaatcccagcactttgataggccgaggcagaaggattgcttgagcacgggaattcaagaccaacctgggcaacatggaaaatccctgtctccactaaaaataaaaaaattagctgggcatggtaatgcgtagctgtagtcccagctattcgggacactgaggcaggaggatcacctgagcccagtaagtcaaggctacagtgagccatgattgcacccctgcacttcagcctgggtgacagagcgagaccctgtctcaatttaaaagaaaaaaaaaaagaatttctaaaagaatacatttgaagaggccttttaaaataaggtaacagtactgaaaatgagttaatactttctattagttgttattaacagcttacaaatatggcagaaatatatggcacatagtagatacttaatatttgtttaattcattttgcattcatcctgcaataggttttctttcacccttaaaaacactattttatttttatttcattgttatatttttattttactttagttctgggatacatgtgcagaacgtgcaggtttgttacataggtatacatgtgccatggtggtttgctgcacccatcaacccgtcatctaggttttaagccccacgtgcattaggtatttgtcctgatactcttcctccccttgccccaacacccgccgacaggccccggtgtgtgatgttcccctccctgtgtccgtatgttctcattgaaaaactattttttaaaataaaaaatttaaaactattttaagtcataatgccactagatggcaatagagtttcagtcacagccatttatttggtcaaggagaagtatgtcattgaatgtatcccacatctttcctttattaaaaaaaaaaacattaaaatagttaagtttatatgttatatgtgaaacagagagccttaggcaaaacttttaaaataaatatacacaaagttgaatttctcattaagagctacccgtgttagcttatcctgtcttcatcttacaaattttatttagactttgccttcatagattactctcattatcttaaaatggagtttaaaacattcctaaattaggggtagagctctgtggtttcactagttgatgaagtcctccctgctttgtgtgtctttctgtgagaaagccttattttgccttttccagtactgtcttttgtaagcattccttcaccgttatccatgaagcaaaagagactaatcaaaagctgcataatcacttagcattaagaaaacagaaaatgcagaaagtattggcatttcaatggctagacagaaattttgaagaagttatgtttttactgattagttttcaaaggcctcatagatgacataacatttttggaatgtcatggattccagtttttggaattgtttgtcaagatgggagacttcttggcaaaattaaggggaggtggttggtttatatctgtaaaccaggaaggtgcatatacagaagtcaaatggcaaagaaaacttgcagcaaatgtttagtcacatttcccatggcctgccgtgggatcatcaggtatctctctttggctcccctctttctgcagcacctttgaccaagagacaaacaattagccctcctctcttgccccagtgccagctgataatgacccaagaaaattgttcaagaattccccattgtaggccgggtgtggtggctcacacctgtaatcccagcactttgggaggccaaggcgggtggatcatgaggtcaggagatagagaccatcctggctaacacagtgaaaccccgtctttactaaaaaaaaaatacaaaaaattaaccaggcctggtggcgggcacctgtaatcccagctacttgggaggctgaggcaggagaatggtgtgaacccaggaggcggagcttgcagtgagctgagatcgtgccaacctgggcaacagagcgagactccgtctccaaaaaaaaaaaaaaagaattccccattgttaaatattcatactttaaaaatacttagtactagacttcctaaagtcattgctttaactttgttttgtttttaatgtaggaagcctgatgttactttggattttatgcttccaagaaaaacaagtttgtcatctgatagcaataaaacattttgcatgattggccattgtttatcatcccaagaagagtttttgcagttggctggaaaatgggacctgggaaatttgcttctcttcaacggtgagtgagctatgattgcaccactgcacttcagcctgggcgacagagtgagatttttttcctttgaaacatttccagttttttttctcagttaacaaatattaaactaagtaaattaacctggctaaaatatccatctatgttcctttacttgtgtttaataagtactgtatttccaagattctaagatatacttttaaaatattttaacgtttttgtaatctagttgtgtcttacaattgatatatacatttaatataaaaatgtatttcttccatcctcaaaaaagagaagctcatattaacttagcgtttttttatactggataatgtagcatcatgactagtaaacttatcttggttgtctcctttataattttattatatcttatacaaatatcaaattttagggaaaaatgaaatatatgatttttaaaaaatatgtccttaaacctcacacataatagcattcagacagtgtttattgactaaataggaaggaataaagatattgattcaaattttagttagaaatggagtttaccaagatatagctcccattatttaaaaaatacaacaaagtaaaataaaacagaaaacctgttttctggctaaggagcaaatggaaatgttatgatttaattaaaagcttcacaattaactttatatacattaattcatcttccatcatagttgacataggttattttctcgttacaccaatttcgaaattgaggctttatcaattttataaaatatagtgaacaactgaaagaatctggctacaaaaaataattcctggtttcttgctttttatgaaaaattctggttagggtgttttaaataactaactttatttttctgctattcaggagctaaggttggttcacaagaggccttttatctgtatgcttgtggacccaaccatacatctgtaatgccatgtaagtatggcaagccagtcaatgactactccaaatatattaataaagaaattttgcgatgtgaacaaatcagagaactttttatgaccaagaaagatgtggatattggtctcttaattgtaagttttaattttataaattttaattttatagtaaatgtatttaggtatatttattgtaatgtatagttatgaattagatttctaaagattttaatgtggttccttatcattttcttttcttagaattatgtttttttctgaaaaaaattgaaacactttgatctcctttcaaaatttgtttcaggctttatatttatatctccttttccttgaaattatatttctataaaaagtttatcagtttagtttattttatacctactaattattcaggaaaaatgtttatgatacagtgaaaataacacttgttagtttgacatactcctaaaaaatgttgctcattatattttctttccatacttataaataaataatatccatttataatgttagttttagttacatgtattcaggtcttagaaaacctactcttttttattttttatttttttttttaagagacaggatttcactctgtcacccaggcttgggtgcagtggtgtgatcatggctcaccgcagccttgaactcctgggctcaaatgatcctcccacctcagcctcccaagtggccgggcctgtggtcatgcatcaccacaccgggctaattttaaatttttgtagagatggaatctcgctttgttgcccagactagtctcaaactcctggcctcaagcgatcttcccgtctcagcctcccaaatggtgagattacaggcatgagccaccatgcctggcctaaaaaacttattatttaatatcagtaaaattaggaattttgctttcaaagtattgctaattctgcttatatgagactctattgatttttatatattattccaatattttgttctaccagtatataatgtaggagctagtggtgaggatttttcgttatagcaactagaaaactgagccttcataaatagtcttagaaaatctactaaaatctagtagatctggccatgaaactgggttcctctttctcttgcttcttatgagaagtacagatatttcttacttgaaggagactactgttttggaatgtattttgttgtttgtggtgttgttgttgttgttgagttgcggggagggtagatttggttgtcaataattattgggtagtaagggccagtgatgctaaatgttctacagtacatgaacactattatacaacaaagaatgatcctatcctaaatgtcccaccattaagaaaacatcctttagggaaatggttcctcaaacctgagtgtgcaccagaatcatccagagggcttgttaaaatatagattgctgggccagagcttctgattcagtaggtctgaagtgtgaccctggaatttacatttttaagaagttcctaggtgatgctgatgctggttgaggatcacactttgagaacctctgccttagggagactgaggagctcacacagatgtttgttcaagtaataactttaactcaatagtttttggttaatccatttgttttcatagaaaaatttccctaatccttttatttttcctgaacggtatataggtcatataagttacaaaactcaacataaattatcatgaatgaaaattctgagggttttatgtgaaaactatttttagagagcaaattgtttaagcccgatttagtaatttgggagttataagcttgtgaaacaatggttagggagaagtggtaccctcggccaggcacggtggctcatgcctgtaatcccagcactttgggaggccgaggcgggtggatcacctgaggtcaggagtttgagaccagcctggccaacatggtgaaaccctgtctctactaaaaatacaaaaactagccaggcatggtggcagatgcctgtaatcccagctactcaggaggctgaggcaggagaatcgcttgaacctaggaggcggagattgcagagagccgagaatgcgccattgcactccagcctgggcaacaagagtcaaactctgtctcaaaaaaaaaaagaaaaaagacaagaaatggtaccctcatgtcagggtgcaacgtcagatttctgattgaaactactgcaggtttgaaactttgcttttccagcataatcatacacaacagacagtataattggtttagctggtgcacagatacgctgggtggtatgtctgattgctgtgggtcataaataaagcacaggccaggcacggtggctcatgcttgtaatcccagcactttgggaggctgaggcgggcagatcacgaggtcagaagttcaagaccagccagttcgagaccagcctggccaacatggtgaaaccctgtctctactaaaaatataaaattagctgggcgtggtggcatgcacctgtaattccagctactcaggaggccgaagcaggagaattgcttgaacccgggaggcagaggttgcagtgagctgagatcacgccactgtactccagcctgggcaacagagcaagactccgtctcggaaaaataaataaataaataaataataagaataatctaagcacaaggcccccatccagttctgagagaagacactgaatctatatgatttccctaagcctgggtttggcatctactaccattaaaaccaccttaaagtacattatgggccagacaccaacattcatgcctataatcccagcactctgggaggcacaggcaggaggatcactttaggtcaagggtttgagactagcctgggcaacataacaagaccatgtctctacaaaaatatatatatatatatatatatatttaactgggttaactgggtgtggtggcaggtgcctgtagtcctagctgcttgggaggctgaggtgggaggatcccttgagcctaggagttcaaggctacggtgagctatggtcatgccactgcactccagcctgggtgccagagcaagacactgtctctaagaaaaacatgcattctgtatttaaaattaactttaatttttaaaatagtttagagaatcttgacagggagccacacactgatggaaactatcctttgcctgggagaaatatttgaagttctattttattttagttaggtgtgctgactgttgacaatctggaattttattccagtagaaagatctagtttagagttgcttttaaatgaagagtcagccaatgagcaaatgcaaagcaaaaatttcaaataaattgacctgacccagagttcccaatatttttaagtgcttagaatagtgcctggtatgtaataagtgtggtttaagacttagttgatattagtagtaatagtataacttaatatatattctaaaccgaacaaagctggaatccttctcaaccttgatgtgatctatacaattgatcactgctaaataaatcactgaccatttgctttgtgggaaacagccttgcttctaatgtttatctgtttagtgtagtagctgttgttttttaaacaaagaaaaggatcagttgagtgtgttttcactttgaaatacttacttgctagttcatagcttgcattttaaacttgttgtcattactgaatgaaaatatttgtatttcaggaaagtctttcagttgtttatacaacttactgtcctgctcagtataccatctatgaaccagtgattagacttaaaggtcaaatgaaaacccaactctctcaaagacccttcagctcaaaagaagttcagagcatcttattagaacctcatcatctaaagaatctccaacctactgaatataaaactattcaaggcattctgcacgaaattggtggaactggcatatttgtttttctctttgccagggtaagaatcactgcttatagttttgtctaaagagaaatgacttacttattattgataaattaaaggatttcttttggaccacacgaaaaagctacactcgactatattaaacttttaacataaaaaaattacatattaaaatgttattaagctttctgccatagatgattaaggtttcttctaatttatgaatattttagaagttttctattaaccaaaaatgtaattagtacaattaaatgttaaatgtacaagattttaaattgagaggaggatatttttaaaaataaaatttatgaagtttttattccttaaatgtttccaatgcataggaaaaaactaagggtcaaaaaatactttaaaaaaaaaaaaactttaatttgtttgggtttggagttttttcaaaaaagagacatataaagtttgactcaggccataagtaccattttcgaatgagtcatttaattatctgtcctgatgcaaagtagacagtcagtaattatagactatttcagggattgctgaaacctatgttagggagcaccaacagtctcactttggtaaaaatcatttctacttcctctggatccacatccctgtttaattaaagcagctttgatcttccttcatcctcggaatgccatcttcgttttatccctaagtataacttttgcaacattatcaagttttcatagtctccctatctaactttctttaatggaagcatcgttgattaattttgcaataagaagcatatcagcgtttgttgttgttagggttcttacaaatattttgttagcatttgatccaccatactctgtaatctgtcttttcttctccacctcttcctttttcatagtttttttaatctagtgtctagttaaatagattatctcctagtgttttaaaattaaaagccctttaactcctcaccaatattttgtgatattttgtaccatcgtatagtttcaaaatgtatatccttgttttcttctctttcatcaaggtattgaatataattttgttattgttacatagagattggatcttagataaaatgtttacatttttatctttatatgtttagtatcttgccaataagacttttaaagtatgtttttaagtctaaaacttataaaccttgttcagtatccttcctcctcccctacaaaaataaaattcagtgtccttaaaatccttacatgcataacctgccttgtgaacctggtctctacaatccagccaaagaggcaacctgcagcttcctagatgtactgtgaacttccagtttaggcctttacccttcccctggctgtgccctgccttagccacccctttattcctgctttccaggatttggctctcttcctaggccatcttctctctgtgtagccttcccttaaaccaagcagagagggatcagaatggtctctgtgctctccagaatacctattgtctcattcttctttggcctttagcatgataataagtgtgtgtttcttatgtatatagtagttgtcagaaagtgttggttgaagtaaattgacatacaaggcaggacatgtggtttttatagatacatcttatctctttgacaggacagtagaccccattgggaacaagtatcatgtattttacttctttttatctcccttaccacataatgcagagcctgtctattgactaacttatcaaaaacttatgacacttcagatcactagttataaaatgctactggccactaaggttgtgtgtcattgtatactatagtatatataagagactatagaacatggagtttatgccttactctcagttttgtttattcacaagccttacataggtagagtatgagcattaaaaaaatactttgtagaaactaatggattgatgttacagaatggaagattatacatgttaaatttttactctcagcaaattgggagaaaactatatccacccatttttttttttaggttgttgaactcagtagctgtgaagaaactcaagcattagcactgcgagttatactctcattaattaaatacaaccaacaaagagtacatgaattagaaaattgtaatggactttctatgattcatcaggtgttgatcaaacaaaaatgcattgttgggttttacattttgaaggtatgtcttcataaaatttattcttatagtttcatatgcagtgatactcatctcgtcatcaaagtcttccaataatagttttgtatttcagttattcctgaagaaaatggaggaaacttattagtgtatagttaatcaaactaagatactcttctagttcttttcatcatttaaataattacatttttcttttctttaaagcattttttaaaagtaagaaagaaagaaactcattgaattttagacctgggtgggccatagatatctcccatgctgtcccttcattctgtagattgatgagatctttgctttagctcccacccttatggcagagaacccagttctctaggcacctagaggcataccattccattaggcactgctgctacagagttagtttttcaagtcacagatattcgtgctcatttttattatgatcccgctatcatcatatatttaaatacatttctagatgaaagcatttggtaacattgtggaaatatttctctctgagacttctggtactaaggcaaaagacgattgctctacccttgcctccacccctacttctttaaactgcaagatccatacatttgtggcatgaatccttactacttttttgaaaacgttttaaagcctaatagcagattaattcaatttaaaacataaaaattgagtgctgtttgttttcaccccttgtttgaacctgagtactcacttaaaaatatttgtaagtttgggattttctacttatctgaattgttttacaaaacaagttaaagatactttgtgaagtgttaaattatttactagctttcctttgaatttaatgattgctaaaattgaaagcttaatgtttctgttgaacttcctgattaaccaattactaatgcatcttatattaatgctaattttctatagacccttcttgaaggatgctgtggtgaagatattatttatatgaatgagaatggagagtttaagttggatgtagactctaatgctataatccaagatgttaagctgttagaggaactattgcttgactggaagatatggagtaaagcagaggcatgtaatatgtactttttttccattttttattgtggtaaaatgcatataacacaaaatttaccatcttaagcatttttaagtttcagttcagtggcattaagtgcatttacagtgttgtccaaccatcaccaccatccatctctgtaaatcttttttgttttgtaaaaccaaaactttgtaccctttaaacaaatgttctccctctttctctagcccctggaaaccaccattctacttttgactaatctaaggatctcatataagtaggatcgtatagtatttgtctttttgtgattagcttatttcacttagcttaatgtcttcaaggctcatctgtgttgtagcatatgtccaaatttcctttttaagaatgaataatattccgttctatatatttatcacattttgcttatccattcatcagtttagagacacttggattgtttccacattttagctaccgtgaatagaagcatatactcgtttttttgtttgtttgcttttgtttttgttttttttttgaaatggagttttactcttttgcccaggctggagtgcagtggcgtgatcttggctcactgcaacctccacccccaggctcagatgatactcctacctcagcctcccaagtagctgggaccacagatgtgtgccaccatgcctggctaagttttagtattttgggtgtagacagggtttcacacatgttgctcaggctggtcttgaactcctgagctcaagtgatctgcctgcctcggcttcccaagatgctgggattataggcatgagccaccacccccagccagcatattcttttaaatatttatctaatcattcttctgaaagaaataattaatttattacttcattgtaatgttaattataaatggaaatctggcacttatttcccatgcaaagttttgaacagccatggggaatgctgagctggagagtcaaaatcaaacttgggctggctaagaatactgcagtcaggcaggagcatatgggcttatctggatcagctgaaggcttgcatttaccataaactctgaaaggggagactgctaagagtcaggggagtcaggtccaggagagggaaatggatacacttctaactaggggagccatgctggccaggagttagagataggaccatggtatatagggcaaggcttcatcgtaagtacaaattaagcaacatagattgatcttagatgtaggcactacatctcagcacctggaatggctgggcttgtcttcacaaggacccagtcagggaatgagtatagggttgtttcctttctgccctagttttaagcaatcttaatagtataggctcatacagccttcttagttctagtgtagactgtttgctctaagtgtggcagggttctagtaggtactgatgatttttgcaaaaaaaaaactagattgtctagaactaattagaatataacaagattatcaacaaatattatttatagagcaattcagaatatatatacctttagaatttttttaaaatggttattcccaacttgccaacagtccctaaaaatttacacattaccagtaatgagttatgaggttgaaaaaagactccttttgttttttgaaacaggagcacactctgtcacccaggctaaaatgcagtggcaccatcttggctccctgcaacctctgcctctcaggttcaagtggtcctcctacctcagcctcccaagtagctaggactacatgtgtgcaccaccatgcttggataatttttaatttttttttgtagagatgaagtctcactatattgcccaggctggtctcaaactcctgggctcaagcagtcctcccgccttggcctcccaaagtgctgggatacaggcgtgagccccccatgcctggccaaaaaaaaaaaaaaaaaaaaaaaaaactaaaaaaccttttctaatctattagtaataaaaataagtttagttcaaatatgctagaggaaagagaattttctattcttcctatagaaaattatattacaaaattgttgttacatgaagaggcaattcaagagtatgcagccacaaaacagagaaaagtattttgaaaggcatgtccaacagccaactaactattgccatgtttctggattttgtggtattcatggtacttttcagttttttaaactttgtaattggttgtgatgccttttctcactctgaataaatatatactttcagatctaaaaaaaaaagataagatagattaaaatatgtgtaatattgcagggagaaagcaaataattacagggatagcatatgtaaacaaattggatcaaaagcagtataaatgtataataaagaatatgctcagttgcaggttggaaaacctaacttggacaaagttggacaaagtttatttagtacttcaaaagagcaggcaaatttggggttgtttgattttaaaagaaacatttttaaattgaatttgaaagtgataagacacatattacttctatggatttgaaataagattttcttacgtaattaattatatttgaactaagtctcgtttttctttttttgttggtatttgtttgtttacattggcactattttatcttggtactacttttcagatttgaatcatgttttcatactttggctgccttgtctgctggttttcgtgtggctttgtcttttagaatatcttggctctatcttataaagagagagaccctgggtagaagagtatgattaagtctatcaatatcttggttcattattgccagataatggcaggagaaataggctctgcaacccaagccagttaattttgctttttgttaaaagctttattgaaaggtcaattaggataataagatgaagggaaggttatctttcaatattagttatcagtgtaagatctctttttttctctagtattatggacaagttaagattgattcaatatgggagaagcattttaaggcactgtcaagggatgctaactactctttgaagtgcatagtttgtaatcatgcagataattctattatttgaacttgaaagtaaattaatctaaaattgcagaattttgacattatccatgactcttcaatttagtatgatttgctctaaaattttttggttaaatgctgcatatgcagattggtattgaaatgtgtacatttttaacaacactctttgaacataaattatttaaaaacaataatgttggtaatgtgtgtgcttctctaatttgaataatccctcttgataattcatcttttgaaaatacatttaatgccacagaaagggtaatgtaggaaagcacctaatacaatattgtattcaacatagctatttagaaatagcctattggcaacaaaaaataatagggaataaattttaacattggctttttgcagacatgtaatctttgatactgaatatatacacaatgttaaattgttgcgcgttgtgtgtcttccaaaaagcatgctgcatatttttcagtaagtatgtgcttattggtgtgtgtttatctcttcagcaaggtgtttgggaaactttgctagcagctctagaagtcctcatcagagcagatcaccaccagcagatgtttaatattaagcagttattgaaagctcaagtggttcatcactttctactgacttgtcaggttttgcaggtacttttcatgtaactttacttttggaaatatattccacagttgtttaataatactatgaacatcaaatttttgtggcactttcaatgggactttttttcttttttttttccatcttctctccagattctcttctttcaaaaaatagtacaggagtttttcaactgctgcatcttacagcttgatcatcacgctgtcataattcctaactcaattacaaaagtacaattactaaatttcttagatgtttctttatgttgggatagaataatagttttgtactgccttgaacagcaagaatagttaatgaattttaacttgttccatattccttaaataaatatttacaaatatgtattgctttaataaatataaacttgctaacggtctattttatatgctagaattagcattttaaactgtatccaaaatttttattaaaaagtgacactaattgtatcagttacattgtaatgtctatgctgtggcccttttagttaatttttttctctgcctttattgatatcatctaataccaaccaaacagataaaaggcattgataaatatctgcttggttggtatattagacaattttccaagttttttttaatgtctaaggcatcgattagaactttgtcaagttagataagtacagatactccatgagatcagtaatattttatattttgagcgcctttgcttcggtggcactaagggcttttcattatagttgggctaaaattcaaaatctgtgacaacatctgtaagaagtgttaatatgagaaggcttatatgatctggctaccattctagcttcatcttatggtactcagcctccctggatttctttcccttccttaaacaagtaagacttttttctgtctcagagtacatggtattctttttgctttaacaattattgatcccattcttttcatctggccaactcctacttatcctccacgtggcaacttaagacttacttcctgagagataccttccctgccctttccatataaattagtctttttccctttatacactatgtacatacagtttgttagttatttatggaattatggtttatttccctctgtaagcctcctgaaagcagggatatggtttttgttttgttttgttttaaatcacactgtaatgtcagtacttgacacacctgggcatctgataaatatttgttaaatgaatgaattccaaaaacacaaaaacattttattgcctttcttggcccctgtggtaaattagactattgttgtagggaatagaatatgtcgattgatccttcaggccccttgcttactgagtgttttatgcatcatttatacatcagttttcctcaaaattttttccttcgcatgtccattttgaaatatattggccaattttcattaagttcatatgacaatgtgatattcttattcagtctttgcatgtcagaaaagtggcacttataaactttgagatttccatatattttttcacttttgtattatttacaaaaatgctagaaaaaatctaggtacaaatttttttctttacatgtatagttctttacccttgtttgttcaaagagcccacttatcaaattaacagccatttattaaacatagctttatgtcaggtattgtgggaagtttataaagaaatgaacttagtctttgcctttaagttacctcagagtgtttgtgcactttaggaagattaataaattggtagtatattggatgtaaggcagtttcattcatttgtgagtacagcataaagaacctgaaccctggtgattaaaatgggagtgtttagtagggagcaaatatgggagagattataaggatagaattcataggacttgattctttttaaatggagcttcaggaggagtcaaatataacataaaatttcaagccgggagaccagaaaaacaataatttcataagaaaaaaaagcaaccttgtaagttttgtagtttttgtatctacatttgaaattacagcaggatattcagcaacagtgaactggtaatagtgaagccatcaggatagagaagcactccaagacagagaaacgtagtgagagaatcagaggactgaggtttacacctcaggagatacccattttcaggatgtgaaaccagaaaaaggggctattgaaagagatacagaaagagtaattgaaaagctaagaggagactcagtaaagtgaaagccagaggtcggcagagggggaagaacatgtagagaagaagatgataccttgaaccaaatgatatagaaagttcagagaaaatgtaggcagataaagggccattgactcagaaattcttaatgacttacaagatttcaatagcatggataaggcaagagccagatttcagggactttggacagcatgtgtggcagatcattgaaggcagtgagaacaaatgattattaaaaagtccagcagcaaaagcaaagacagaaacagaatgttcatataaggtaaagttaagggattaaaaaaataataaaatagaataccagtgactattgataaagagtcagtggagagggcaagatagaagtaacctgggctggacttgggaatgaatcactgatgctgcaaccaagaaagttaagaagatacatggagtatggtttagaagaaatgcagatggttgtagcagaaatagttctgaattggaagtcgggagatctatgttcctgtcttagtctttgccacttgacagctatgagaacttggcaaaggagttttgtgttttcttctgtagactcagtgttcccttcttaaatctgaggtagtcgaactaaattgtttcaaaattaacatctacattttaagtactccaattcagtaatacccaagagtaaatgaagagtggatgtagagatatatatttggacatatgaagagggaagatgaggaattttacctcccatacccttaatctggaggccagctgctacccactggggagatggaattggaggatataagcaatttatttatatacagctttatttttagtaattagttggcattttgccaagcctcattattccagacagtaaatggtgcagtagaaagagttcagaggcctgagtttgagttataattgtactacctacatattttatgtgtggtttacactagtcaaataacctctttgtgcctcatattctagaaatgagggctaaaacctctcatagagctgttgtgaaaaaaagctttgtaaactggagcatattgtattagtataacgagttttgtccatcaaaagttttctgtcctaatcctatactaatattactaatagtagtagtagtaaaaggagaagaaaagatagtagcagtagtaatagtagtgattgtagtttatcactaacatttatatggggcttacctatatgcaaggcactattctaagagtttatgttatttagtccttataacaaccctataaagtagcactagtattactcacatagacaaagaaagtgaagcatgcagatgttaagtaacttacctaagatcacatggctagtgagtggagaaaccagaatgcaaacctaggaagtctggcttttgagaccacgcttgtgagagttatataagtttgcctcagttaattaagatacatgggctagaattaagttgccatctgtgttaatgaatttttaataacaagattgcttgaattaggaaataactcaatttaatgagttgttatggtaatggtaagtatgatcagactagagtagtaaaccaacagaattctatcttaaaaagaatattttgcctaaatgaaaaatcttagttaagttgacaattctttaaatctaaagagagttttttttattttttcaggaatacaaagaggggcaactcacacccatgccccgagaggtttgtagatcatttgtgaaaattatagcagaagtccttggatctcctccagatttggaattattgacaattatcttcaatttccttttagcagttcaccctcctactaatacttacgtttgtcacaatcccacgaacttctacttttctttgcacataggtaggtataatcatttttgttagatcatggctatttccacttttgttttattcttcccacttgattcacatttgtttgacatttgaatggcctctgtgctgctctaattacatattggggttgggatagggcagagagttatagaatgaactagacatggcctctgtcctcaaggagtctaaatgccaagtggagaaaggagacatagactcaaataactacagtaaaaaaaaaaaatgtgtatttggtaagtatcaaagagacacaaaagaagaactaatgagatttcagtggacagagggtttcatccgaccactgtggagagaatatttaataggttacatgacatctgatgtagacattgaagattttgagtagaatttgataggtagattggagagttagtgttccaggtaaagacaatgactttaaagggaggataaaaggaaatagaaaataaggactaatgagttttacctatatataggggatctgtaaaggaatagtgagaaataatgccataaatacagtttaagaccaccatttacttatttttaccctaaagtcatatcaaatgggtccttgaatgtaaggccagagaattcgaacttgtattctagttataggtcattgaaagggttttatttgtttgttttgagcaaaggctataagtaaattattgcagtagaattcaggaataaggaactaggggcagtaaggccaattatagtagtccgtgagagacaggataacagaatctgggcatagtaacagtggaactggaaaggagggataaattgagaagtgggaagtttaggatggaatgactctggaggtgttaaggaaaaaggataatggctttggttgtataatatatgttgtatttgaggtgccctgcagttatttataatataattttctagtaggcaattgggaatgagggttacagcatgaagaaggaagggtaggttataaggagctgtccacatagaagtgaggtgaagctctgagaacagatgagaccactgaagaaaagtagagcaagagaaggaaagagaaagctaaggaaagaactgctggtaatattactagttggagggtaggacaagaatgaagaatcagtaaaagagaaagatggaataatcagttttttttaagaaccagggaaatgtaatgtaagaaagaaagcaagaatgtacctacaagaaagctgagtcataaatttacattggaaaactggttgtacaatagccattttaagagatgtagtaaatggggccaggcacggtggctcacgcctgtaatcccagcactttgggaagccggggcaggcagattacctgaggtcaggagttcaagacctgcctgaccaacatggcaaaaccccatctctactaaaaataaaaaaaaaattagcctggcatggtggcacatgcctgtaatcccagctacttgggaggctgaggcaggagaatggcttgaacccgggaagcggtggttgcagttaggtgagaatgtgccattgcactccagcctgggtgacaagagcaaacctccatctcaaaaaaaaaaaaaaaaaaaaagaaaagaaaaaaaaagaaatgtagtaaatgaataaaataagcagcagtaaatgtccaaatgaaattagatagcatgactttgtggtaggcttagcacatttcatggaaaaaggactgtggataaagattctgagagtgggttagttacaaagatgggtaaaatatggtcccctctcttaagacgtttacagcctagttgagggaaagaggataaagaaacgattatatcatgccacgtggaaagcacagtgataaggcagtcaacatttttgttttctggtagcatagagcatatgaagactgagggggatttcccagaggaagtgatgcctgccctgaatcttaaaggatgagtaagaatcaaagagaaaagggccttccaggtaaaggaaacagcttgacagggaactaggagaaagtggtgttgctgaaatgtaatttatgaaacaaggcttgggagggacctagggacaaatagtggtaattcttgtggacaagaagcttgggttttatccaaggtggtaaggaggcatagaaagccactggaaggttttaagcaggagttgacattcgagagagagcgaattctggtagctgtgaggatttgagagtaatgagatgctcatcaaggataccatttagaaatctgtgatagtaatccagttgagagatgataaagcctgcattatagcactatggtagggaagagaagaggtcaagaaacaaaaaatgaagtcatgctaggcatggtggttcatgctgtaatcccagcactttgagaggccaaggtgggtggatcacttgaggccaggagttcaactccagcctggtcaacatagcgaaacctcgtctctccttaaaaaaaaaaagaaaaaaaaagttgctgggcgtggtggcacatgcctgtaatcccagctactcgggaggctgaggcatgagaattgcttgaaccagggaggcagaggttgcagtgagcaaagatcacaccaccatactccagcctgggcgacagagcaagactgtctcaaaaaaagggaaaaagtcagtagaacctggtgactgatttgccatggataaaggaaggtagtggtcaagggtagctccaggttaccacatgggaacttcccaaagaacaaaacagaaggagtaaatttagggcaaaaagatgattcggatttagatttgttgcatttgtgatttgtttaagaaaccaagcagttgaatttataagtatgaagctcagaaatgattagtttttacaaatattagacactgaaggggatatataaaaataaaagacacagtcctttcctcaaggatgaacaatctcccttgagagatgataataacatataaaagtgaatagttaaatgttaaaccatagaaataactataagtacagttggaattaagaaaatagaagttaatgtggccagaaataataaacaacagcaaaatctgtactaaaaaattgtgaagagtaagtattcacatatcgtgtgccttaatataaagtatgctatatatttttctctttaaacatctttttgtcaaaatttgaatttaatgatctgcttttaaagttatattttcgttttatcctttttaaaaattttgctgtttcaaaaaaaatttggattctagatggcaagatctttcaggagaaagtgcggtcaatcatgtacctgaggcattccagcagtggaggaaggtcccttatgagccctggatttatggtaataagcccatctggttttactgcttcaccatatgaaggtaaaaatagcaataatggaagtatgaccttctcattttagttctgaatattcttagataattaaattgtacatattttagaagtatatgtagtacaacctcattcaatctaacaagagacacccagcacaggtcctcaagagcattgagaaaatggatgaggctcatgctatcttgttctggcattctctgacttctcttatcatagtcatttgtctttcatcaagcttctgatttattttaccattttcttcagaagctttttaaaaacttttattctcttctgtctacctaaaaccatcattctggacaacttcacttgccagataaatggccacccaatactccagcttcacattttttgactcagggtaccttttctctactttgtcttaccgctctgcatgcatctgtcttggactttatcatcatcaagaatgctttcaagcacctgtgaaactacaatatcccgctttgttctatccatatgatctgtttttcaatcacatgcatcactctgaaacattttcaaatactgtacaatcatggctccatttcttttccaagtcttttgaacagaatcttttttttttataattacactttaagttttaggatacatgtgcacaatgtgccggtttgttacatatgtatacatatgccatgttggtgtgctgcacccattaactcgtcatttagcattaggcatatctcctaatgctatccctcccccctccccccacccgacaacaggccctggtgtgtgatgttccccttcctgtgtccacgtgttctcatttgaacagaatctttctgtatcattagccctccagccaaccagagaaacagaatcctttgggggagttctgacatgctgaaaaaaggcaaaggggatgcattcatcctctctaattgacagcctcccatctttctggtttttttttgttttttttttaatcacactccaaagttccccttgtctcgctttccctatccagcctaggtcacattagccaataacttcagcagttactcagttggaaagtatctcagtttccttgtccccttagcctattggtattcttgaactgaaaaatgctaacctcgcctcagtctaaccattgtcatactgctgaaagttgtagcagagctttaaaggctgccctgtaatttttaggtatgttcagaatcaataccctcttctatttccatagtaagtgtattcaagtctttaagcctacagtacttttctatcttcctaattgactcttaacagagtctcatcgctactttatagaagaaaagaataggtgcaggttttctagttgcaaactgaccatacatcttttcctttcctgactactgtccttttccatactgggacattgctcttattgtcagtccaacctagtcttgtctttagcttcaatcctaattattaaatactgcaggtgagatggtaatagagatagatagaactagatatataggtattagtctctagttttgttttcctgccaaagtgtttcagttattctctagcactttttatgctcttttataataatattttaaggctatgtttttattagttttccttttctttttaaaaaaaattttttttaaataaatgagatagggttttgcctttttgcccaggctggtcttgaactcttgggctcaagtgagccacccacctctgcctcccaaagtgctgagattacaggctcaagccactgcacctggcctttttgaattagttttatttggaattttacaggacatatttgttttttaaatcatctgtcatgttgaaacattttcaaatacaatcatacccccattttttccagatcttttgaagagaatcttttggcaactttagccctctagcccaaatccagaaataactagaaaaagattctgagctatggagctattttattgccacagagtctatgctctaaagcagttcatttaatgcctgtttactctgtgttcatggtctcaaattttaacctgcaaaagaatcacctggagagctgttgacactgattcctgggcccctctctcatacattctgtatcagtagatctagggtggagcctgagaatgtgaagtcccaacaatcccacaggtggtattgatgcccatgctaccagtccacagaccacaccttgaatggcatgcacttgtatcccatgcactacaatgaaaataatttttctggtgtcttcctgcatagaatattagaagcagtaaattagagagctgtgacaagaaaagaaactattctcactaataacagcaagaagtgactgcaaaaatggaggagagagagaactgtctagggctgtttaggctagtaacaacaagtactaccattttttgagcacctgttatatgttgagctctatgctaggtgcatcacaaatataatctcaatctttaaagccaccctgcaaagtagatattctgaaccctcattttacatttgtagaaactgtagtacaattaagtgatttaccttggaccacttcactatcatttgaatccaattatatctagttgcaaagcccacactctttccactacatcctggtaactgctagcctgaggtaaattgagtttcacttaattcacttaaattcagcacagtagaaccattaatcctaatgactttgaatcattcagtcaatactgtattttgttaagaagacaggaaaaaacatatgttttgggaagatattaataaaaagtggttaaaataaaaatagttttggcatttaagaattttaagcattaagccaggtgtggggtgcatgcctatagtcccagctgcttggagtctgaggtgggaggctgtcttgagtccaggagttagaggctgcagtaagctgtgattgtgtcactgcacttcagtaggtaagagagcaagaccctgtctcttaagaaaaagtaaaggaattttaagcattagttacttgtaaaattaacctatatggattttaacagtgctagataaatgggcttttgctgtggttgtgatttataatgcaaaagagaggtggttccacttaatagatttttaagtagtatttttgtatctactcttaccaggagagaattcctctaatattattccacaacagatggccgcccatatgctgcgttctagaagcctaccagcattccctacttcttcactactaacgcaatcacaaaaactgactggaagtttgggttgtagtatcgacaggttacaaaatattgcagatacttatgttgccacccaatcaaagaaacaaaattctttggggagttccgacacactgaaaaaaggcaaagaggacgcattcatcagtagctgtgagtctgcaaaaactgtttgtgaaatggaagctgtcctctcagcccaggtctctgtcagtgatgtcccaaagggagtgctgggatttccagtggtcaaagcagatcataaacagttgggagcagaacccaggtcagaagatgacagtcctggggatgagtcctgcccacgccgacctgattacctaaagggattggcctccttccagcgaagccacagcactattgcaagccttgggctagcttttccttcacagaacggatctgcagctgttggccgttggccaagtcttgttgatagaaacactgatgattgggaaaactttgcctattctcttggttatgagccaaattacaaccgaactgcaagtgctcacaggtacttatgtgtttttgtacactcctcccacctttattttactattctttaaagactctctacccctctggaaacgtcttcattatgccacttataatacaacaaacagaaaagtttatttctttatatacataataataacaaacagaaagatatatttttccttattttaagactagataatattgaattccatatttaaccaaaatctaaaccataagtagcacttaaaaaatatatattgtggtttaattccttatagttattaaggaaaattcttcaggacagagaaacgataggatttatctagagctttgactcatgagaatgattctgtccacttggtgctcatgtgaaggtgggagtgatttctagactgggcctgtcctgagtaacatcttacttgatcagagacaagtgacggctccagaagggaagaggaacaggtgtcatagggtggctgctccattccactcaggtaattataatgcaggtcttagtgctgaacattggcagttcttctctggatgaagtcagaagaaagctaaaatggcctcagaaagcaataccagtgtttcccaggacaggctgtcaccagactgcacagagtcctccatgttatgacagacattgcctaggcgttgtatttcttcagccattttccttctgctaccccagtttgttctctctccagaaacttaaggttcctctgtcacctggacacagatgaccttgctttggtgatgagatatcccccttatattttcctctacttctgctatcgcagacccataactttatatggagctgaaatgcagcagtgctagagagcattccttttatgaaaaaaatctcctttcaccaggagcttccagaagtttcacctgggctaaacccagcagcatttgttaggatatttagatggaggttttattttcacacttggttcttgagaggatattctgtaatgctagattcttcccctgtaccaatatttgcctctcttctctgtgagtgaactgggtttttctgacatgcctagactcctaataaagctgtttcttccttggtgaaaaaaaaaaaaaaaacatttccaatagcatctcaagtagcaatgtccagtgaaactttctgcaatgatggacatgttttattcatgctgtctaatacagtcagcactagccacatatgcctactgagcacttgaaatgtggctgatgcaactgaggaactgaatttttagtttaaataaatagcataagtgacagtgactactgtattagacatcagagatgtacaattgaatagtgttagtagactatatgcccaaaaaaatcaatgataaaaagtgatggtaaatttgttaatcacagttaaattaggaaacatttcttaagcattatgaacatttgtttcacctgttaaaaaatgctactacttgtcacagttcctaaggtaatcatcaagtacttttcttgtcatgttagtaagacttttttggtctctgttttagtgtaactgaagactgtttggtacctatatgctgtggattatatgaactcctaagtggggttcttcttatcctgcctgatgttttgcttgaagatgtgatggacaagcttattcaagcagatacacttttggtcctcgttaaccacccatcaccagctatacaacaaggtgttattaaagtaagggcaaatactagatatgttattttaattcagaaaaataaatatatatgtaatttaaaattttgagtatatacattaaagtagacctaaatctctcttttatattttagaataatgaactaatatagtttgttacttaatactcatatatttttaaactttttttattttgatagctttagggatacaggggtttttggttacatggtcatatttttgcatcatccagctttaagtccccctccatatgttggttcatatcaatatgtcttttaaatctaccaataaatccccatatctgaacacttagtaaatctcttttgtaaaaattacaaggaatacgtggttcattggaaatctcttcttcagtgtactatcaaattttagacatttacttcagctctcagcttagatgacaccttttcaaaaagaccttccctgatgatcttatcaaaataacttccctctaatcttacttattatttattctatcatagcatcctatttatgtcttgtaattatcttattaatctgtgtacttgttttttaaatttctcacaaatataagctccatgagggtgggcatcttgtgtaataggtactaagtatattattgaatgagtaaatgcttgatatgaatagtttccattagaaaacaacccaatattaaaataatcttgtaaagattctcatttttctttagtttgcttggatgtaggtattgtttaatcacttgcaatacaacctagtattgagctcgcatttcatgtgtaagtccctgagctagttgcaatatagtatataaagggaaataatataagcccctacattcaagaatttcacagtctagaagggagagtctcatacttaactaagtaaaacgtaagaaattctgtgatgagtactgcagtggcagtattaatagagaattgagcataggggaaacggaaggattcatggaaaaagtatattttgtgttatgctgtaaacttagaaagcttttttagtaggggaataaatagatgtgtgtctgggggaaaggagtctatcactactgtgagagtcattgaaggggagaaagaggtggaaggattaatttggtattacacgtgttgcatttaagatgctagagaagggtggaaattcaggcctgtgctcaggataaataatctgtcaagaagcctagaagtagaggtctaggatagatatagatacagatatagatatagatatagatatagatatagatatagatatagatatagatatagatatagatttgcagagagagcatagtttacggattttttccctctcagcattaggtacaaatattctatttatactcaactaaggctgccagtctaccaggtgtccatgctcagctaaaaatgccagtttccccatgagagaaacattaagatctccaagatggagtcatcattagcattccacagtagccaaagacaaattcatttctgctttgctgtggtggtggcatttttttaagctttctgtgttcttctgtacatatgaacttaatttacaaatacagttgtgttacactgatttgtatatattatatttaattttaatgcattatctaaattgacttaaattttttgtttagctattagatgcatattttgctagagcatctaaggaacaaaaagataaatttctgaagaatcgtggattttccttgctagccaaccagttgtatcttcatcgaggaactcaagaattgttagaatgcttcatcgaaatgttctttggtcgacatattggccttgatgaagagtaagtgtgttcttccctccactataattgggaatcttttgtcttttttcttttcttttcttttcttttcttttcttttcttttcttttcttttgagacggagtctcgccctgttgcccaggctggagtgcaatggtgcaatctcggctcactgcaacttccgcctcccaggttcaagcgattctcctgcctcaacctcctgagtagctgggattacaggcacgtaccaccatgcccggctagttttttgtatctttagtagagatggggtttcaccatgttggccaggctggtctcaaactcctgacctcgtgatctgcctgccttggcctcccaaagtgcagggattacaggtgtgagccactatgcctggcttttttttttttttttttttttttttttgagacaatgtctcactctgtcacccaggctggagtgcagagagacacagtcatgcctcagctcattgcagccttgaactcctagattcaagggatcctcctgcctcagcctcttgagtagctaagattacaggcacgcaccaccacacttggctaattttttttacttttagtggagatgggtcttgcagtgtttcccaggctggtctcaaactcctgacctcaagccatcctcctgccttggcctcccaaagtgttgggattataggtgtgggccaccacacccggcaaggtcttttgtcttaaatgtaaaatttagtgaactcactcttaacgaaatcttttggtcacctttagaaaaaatctgctaaaagtaattttccaggtaaatcaatgtattatttgccatatgatgttctttctaatataacttcatcctttatagttcattcactagttagaaactagaaacaaataaaagctgcatcagatgaaagtgatagctaagatttggcagatagtattaacatgagaagattaactgaaaagacaggtgaggctgggcgtggtggctcaagcctgtactcccaacactttgggaggcagaggcaggtggatcacctgaggtcaggagttcaagcctgaccaacatgatgaaactgtctgtactaaaaatacaaaatttgctgggcgtggtggcacattcatgtaatcccatctgcttgagaggctgaggcaggagaaccgcttgaacccagaaggcagaggttacagtgagccaggattgcacaattgcacttcagcctgggcaacaagagtgaaactccatctcaaaaaaaaaaaaaaaaaaaagaaaagaaaagaaaaaaagatagctcatgtattctcagtgacagattacataaaggatccatataggaacgccttactctcctcagagccttcaggtcatctgggagaggagtaaatccctcacctagaattcctggatacactgattgctgagttttgaccctggtagaatgctgatggattagcaaataagtgtaaaaataaaagaatatttttctcccaaaccaaaagtttggcagaaattaagctgtaatttctgtttatgatagaatagagagaaacgtgtgtctccttattgtgatagacaaattcagaccttaaagaatttactaaattgttatggtagtttcaatgctacttttcatttacatacaacttttggctttcacgaaacaattgtgcattactttatttgattctcacaatagccttgagaagaaaagaggacatatatcaccacatatttttgacagataaggaaaatgaggcacaaaatacttagctaatttcattccatcccagaggcaagttgtattgggataagaactcgagaatcattcccttttgctagacctctttttactagctcactgtctctcaaatactatgtaaaataataataataattttcctgtgcacttgaagcccccaaacatagtttctttggacataaagggctcatggatgaattaaaataaatcagttaaaaccaagaaattgtatgcatatttcacttgaatgtttgtgtatttatcttgggatggacttctagcaacagcttttaccctattattggagggactctgtcattttaaaaacaggttaagaatccttactcccccaacttgtttttatgacttcaaaatcaagttagcaagatgacccatagttgctatcatattttcttattttgtgattgtttctaatgtgctcttaactgtattatttattatagatttgatctggaagatgtgagaaacatgggattgtttcagaagtggtctgtcattcctattctgggactaatagagacctctctatatgacaacatactcttgcataatgctcttttacttcttctccaaattttaaattcttgttctaaggtagcagatatgttgctggataatggtctactctatgtgttatgtaatacagtagcagccctgaatggattagaaaagaagtaagtttaaaattattatttaaaattacatctgataaatactttagaacaggaaaactttagtattagtttactttactacatgagtttacctatgtaagaagcctttctgtgtacctctgaacctaaaataaaagtaaaaaaataataataacagaaagaaagaaaaaaaaagcaagaaattgtatttactgaatgtccctgtatgctactttattaactggcccaagttagtttctaaccctttcttgatttggaaaacccagatggagagaagcattgtaggcctaatatcgtacattgaggtagattatcaagattaagattgaagaccagaagtaactaattcatatttattggatatttataaataatataaatgcaaatctattacctcttttagtcctaaaaataaccctaatttatacaagtgagattcagagaggttaattaatttagtcaaattcaccttctctgaaaagtcttcgcagaatgttcctgttcatacccacacaatcttcatccttagtgtggactagaaactgcctatgtgttcttatagtatcgtgtattaatctctagtgttacacttacaaccatttactatttatagtaatctgtttacttgtccagttctctgtaaaactatgtatttctgacaggtgtcaaagtgtatcttatttctatttctagcatacatactacatattacttgccatagaataagcatgaataaatactgaatgactgcatgaatgagtgcaagctggtcgaacaggaatttaaaccatttaaatcagttagctgtgtcttaaattatttgttctttttcttataaatgttctgttttcttcttttgttgttatctttagcattcccatgagtgaatataaattgcttgcttgtgatatacagcaacttttcatagcagttacaattcatgcttgcagttcctcaggctcacaatattttagggttattgaagaccttattgtaatgcttggatatcttcaaaatagcaaaaacaagaggacacaaagtaagatttaatttttatgaatttggggagggagttgtataacagacaaacctgttatttgagcacaatctctttcttcttagaaactcttttactaaaagtttaacattaattttgtaatagtatctatcagtttttaaaaagaagcctaaaaaggcttgaaaaagtggcaaaaatagaaaaagtgattcccccatgtagttagtagttggcaatacataagtgaaagatgtcactgatttttcttaccaagtagaatttaaaagtgtatgttgcatagtaataccctttagttttctttaatggtaattattaaagtgaatatgaaacaaaaaatatgataattgccggttaaacttttgccttatatagaaaaaaagcctgttctttgaaacaatttttaaaatgaaataaatttatgagctaatatttttccattgaaggttttttagtgaccatttgtaaatttgctttaaaattgcttttaacaagaatttaaaaatgtctactaccatcatccccatgctgatcaaaatttaaaaatttatatcaaaacattattgtcatgatacataaaatcagttcaattaaaaaattagtaaccacatagcttgaaaacattctagtatcttctgtttttagatatggctgttgcactacagcttagagttctccaggctgctatggaatttataaggaccaccgcaaatcatgactctgaaaacctcacagattcactccagtcaccttctgctccccatcatgcagtagttcaaaagcggaaaagcattgctggcgagtattgaaatcatattttaataaccataaattgaggctagcttgactttcctatgttcttatgccattcacacttttaaaatatttcttgttttacataaaatttaagaaagattttttcctgaaggaaactattctgctccttacttttagtgcttttctcattcagttatttcttgagcacctgcctaccatgtgctgagcattgtgctaaatattggagatacaatgatgaaaaaaacagacacagattctgcccctgcagagattgtaaaatagtagggaaatgtagagggtaggaatagagattataacagggcaatctacatcaggagttagggaagtctctgagaaaggtgtccagcaatcatgttgtggcatgcaggaagctgagcattaatgctagaactgataaagaatctgtttctactcaggacaaaagagatgtacaactgggagggcagctaaagaagaaacagtgcattcagatattaaataaggaagaatgtcatcaaataataaacattaatattgttagtcttccttattttttctacaaaatctgctatcatctttacccagaaagataacatgaacaccacatacacaggatatacacacatacatatatatacatagtggataaatatgcatgtacacatgcacacacacacaccatctccagagtatttggtaaattgtttgaaatttaatcactcttactgtcttaaattcacttaagttcaaatctttctttcacccgtgttaagctacttctgtgttcaatgctatgcaaaaattttaaaccatgtgaaaaactcacttgtaaagaaaagctaccaagtacccattgttttgcagtagtatgtttaaattatgctaaatcaaacttatataaataaaacttctaaaacatctatgtaactaaacttactgccctctacattcttccttatttaatatctgaatgcactgtctcttcttgagctgccctcccagttgtacatctcttttgtcctgagtagaaacagattctttatcagttctagcattagtgctcagcttcctgcatgccaaaacatgattgctggacacctttcctttgcaggactccttatgtagtcagtgactgcttagatggaatttgccctctcttgatatcagaaagtatacctttactacccctgctgtttcttttgtattgatacttctcattctcacatctgttcctcctctgcttccatctctagatctctggttttagttaattatcaccttgtgcctgggctaacacaatagtcctcttgctatttcccatttggtcaatgatttctctagcagtctttagtctctctctttagatactagcattttgtcaccttgagccttagagccctacgtaacttcaagtttattatttttttttagtttgagtcattttaaaacagataatgaacttttagtcttttcactagatggctgtccttttttctgacttctgtagctgcttattatacttggacttgtctttttcactctaagtaaatgtgattgctgcaagctataggagacttacagaatcctacaagtttttagcttaataaaagaccttaaaagtcatccagtccagcttcctcatcttaagacccactgcatcctagaactggggactgctggcacatgcacccctgtactcacccctttgtgtcctgcaccacatctactcatcccaggtctatggtatctcttaggacccatctctctctctctctgaagtctctctcaagaatccttcctgttttaagtactacccttattgaaattctgtctttgtgaatctagtttgcaaaataccactttatatgtgttcggttgttgctttctaattgtttctaagttgtttttttacacatatacttggagaagattgtgctttttatttctccactattacttaaaagtatcttcaaaagtatattggctttgtatgctacaggtacaaaaactgcagaatactgaagctcttctgtttctgagcagtgtggttacaaaaactaattcaagtccatttgtccatgatactaaagggacatagagggatttctatttctgtcatgtctatcaattaggtaatgaattgttccttcaaagactcaagccgttctctttactgataaatgtttaggtgtggtaggggggattcctaaatagattcatttagcatttgttgaaaactactgagatgagtgacacctccagccccactgccactacccttcaccttcagcaggagttgtggggactgccagcagctgcagcttgcattatggccacacaccagactctgataatagacaaatttactcaagccctgaaccccaggatatccatgacttggaaccaaagtttcttcagcagtaccgtcattacatctagaccttaagttcttgcattgctagaggagttagataccattttattgtcagattaatcttacaacctcattcaggtttaccattcttctgctcagcagttccaagttgcctgctgcccagtgaacaaagctctgactccttaacctctatatctgtttttggtctggatatctatatctatacatatctttatatgtaattttacctaaatggtatcatgctctacctactgtttataaattgatttctatttctggtcattatagatatttttccatattaagaaacataaatattcttttatttttaatgattacaaaataatctattattttgatgtggataatcttctgtaacttttatagataaacaaaggtttttttgcttggtttttgctattataaataaggtagcaatatatacttttaaatgtatttttttacttgtctgcttattagtatgaaaaactttacacatcacccttaatgcatgaaggtagaagtagtcagcattaggatattatttagaatgctagacatatatttaaattgccatgcactcgcacatacacacagttaaattagtaattcacatacaaatgaactttatatttcagccaataataatactaaccattaaaagtattttattatttgtgagaatgagacaggcattatgttttatattcattattttattttatcaacaaaacaactctttctttatccgtttattcagccctcaaacatcaaatatttcttgagtaccaaccatgtaccagttgctattttatcagtcttcatggaacttgtactggggaaaatgatcaataagcatataaacaaatatatttaatataatgttagatagtgataaatatctaccggtgaagtaagctctgttttctttctaatccacatcttatgcatgagaaaactgaggtttagaaagaaatgtgcttaaggccacactagctctgtgtggcttcatagcaggagtgctgaaataccctcccacgttttctagtattaatacctagtactaaagaagacttacttaacatttccttattcagtgtattatcataccgctgaattacaatcatcagctgcacgtacagcatgaaagctgtcagatgtagacattaggaagaatctgcttaaactaagtatattgtttgacagtaaaactcttgaatatatacaggatatgaatttttgtattttcttttttttttgcctcaaaagtgactatcaaaatacattaactgattaagaatactaattacccaaaatactgagcaatctaaaatagcattaaaatatttaaatatcttacaggataagtctttaaaacctgttataatttagtcatatgtaagtaatttttgtagaggttatttatagaaattgatatatgttttcataatttaaaacaaaggttcaattccaatgaagggttccattattcctcatctaccaagacatcattttggttcctatggtcaacttccgatgcccttctccttcggtccattaaatcaagactcatccccccagttttctcctggatgcactacctgtgttgtacctcctggagcaggtgcagtaatggtgcaggaatgccactcctctctgttcagtctgaggaaacctttctcaggaaatgcttttgtagcattgaattccaaatgatgcatatgttttaaatcattttaataacaaatcactggaattatattcaccttcctgatctcttcactttcattgactgatttctactttgtcactatacacagtttttaaaactactttatgaaattcaacaacagtaattacccagaaatagtagtattcttactaaaaaattatgtgcattaaaacttgattttggaatacaaagaagtgaaacagtatttgaaactattttatcaaaatgttctgaactatttgagcccatttaatactttttaactcgaactttgccaaatgacatctgttttactaagctgtgtcactagcttcaacattgttatttaggactttgaaaccaaaagtactgttgcacttcttcaaagagggagaagcatcattttctcttaatcactctttcctttctataaattgactttgtagtaaataaggttgttttcatggtctggtaatcaaaaaatttcagcaaaaatagtttccttgatccttattaacactgggatttgatgttttaatttatatacttttaaaggtcctcgaaaatttccccttgctcaaactgaatcgcttctgatgaaaatgcgttcagtggcaaatgatgagcttcatgtgatgatgcaacggagaatgagccaagagaaccctagccaagcaactgaaacggaacttgcgcagagactacagaggctcactgttttagcagtcaacaggattatttatcaaggtaagactataggattagtttgtttttcctcagattttaaaatgaaagagaagtaatctaagaggaaactggttggttttcagatgtttaagcagcattatttttcagttcttaacatccatagtattaagagtttcttatttggaactgataagtcttgaataaaagtccactttgaatgtgttcgatgctagcccagactgaccagtttaaaaccatatggcacttccagtatgatcttttgagatcgttgtagattcacatgcagttaaggaataatacagagagagaccctgtgtaccctttacccagtttcccccatgaatcttgcagaactgtagtataatatcatcaccaggtgagtaacatcgatacagtcagcagcatttccagcaccacaaggatctctcatattgcccttctcttagccacacccactttcctctcacccccagccactcagccctgtaactgctaatctgtcctccatttgtatatttttgtttcatcaagaatgttatataaatggaagcgtacagtatgtagccttttggaattagttttttcactcagtgtaatactctggagagtcattctggttgttgcatatatcaatagttcctttttttcttgctgagtgatatttgtggtatggatgtatgaatctgggttgtttccagtttttggctattacaaataaagcttctgtaagcatttatgtgcaggttttgtaagaatataagtctttatttttctggggtaagtgcccaggagtgcagttactgggtcatacggtaattacatgtgtagttttttaagaaactgccaaacttttccagagtggctgtagttttacatttccatcaacagtgtatgagtggtccaagtttttttacatccttacctagtgtttgttgttgtcactattttttattttagccattctgacagatgtgtagtgatatctcattgtggttttaatttgcatttccatattggctaatgaatatatatgtacaaacttaaaatgtaatacttagagcacccactaaaaaaagctattcaaagaaatacactccaaagcactataaatcatgttctcatcacacataaaaaaaagtggtaactatgtgaggtgatagatatgttaactagcttgattatggtgattatttgacaatgtattcatatatcaaaacaccttaattatatacaatttctatttgtcaattatattccaataaagctgaagattgttttttaaaaaacactatagataagtcaaaatggaattctaaaaaaatgttcaggtaacccgaggaagacaggaaaaagaaaacagtaattgttaatgactagaaaaacatgataaactcaagttattattatttttttagctttttttacttttctttctctctttttttttttctttttttttttgagatgggttctcactctgtcaccaaggctagtggtatgatctcagctcactgcaacctttacctcctgggctcaagcaatcctcccatctcagcctcctgagtagctgtgactacaggtgtgcaccccatgcccggctaatttttgtatttttttgtagagatggggttccaccatgttgcccaggctgatctcaaactccttgactcaggtgatctgtgtgctttcacctcccacagtgctgggattacaggcatgagccatcgtccccagcatttttttttttccacttttctaatatacattctgtgcaacagactcccagactaaactctgaaattgaaccatgattatcacatatacagcatgtaaatgtatagcacatgcagagaaacagctctgtagatccactcatgtaaatatgacatgatctttatgtttgatttgtataataatcttatggttttagtcattttgcagtttaacttaccttcattagtccattaaatatttaatttggaattgtatgacatgcattttcaaatttctgttattttacgtaaattcactttctactacattgtatctattacatctaatacacctgatacacatttaaattgtgataactgaattagtaattaaatacaatattttttaccagtattattactatttataatggcaagatagcagtgatatgactaattttgtattctttttttcaattcaaagaatttaattcagacattattgacattttgagaactccagaaaatgtaactcaaagcaagacctcagttttccagaccgaaatttctgaggaaaatattcatcatgaacagtcttctgttttcaatccatttcagaaagaaatttttacatatctggtagaaggattcaaagtatctattgtaagtaaattaattacatgggaaatgttcattcacacaaaggaaatagaggttttatgttgactgtattatacgttttcaaaatcatatttctttgtgctctttcagagagctttttaaaactcggacaacttgaatttttaattatagaataatatatattgctaattcacctttccaaaatgactcaactcatgaagcattgctttttaagcctgtaaccctagaagacattttctagtgttgtttagtaagatcagcatcagaaaagagtagatcatcatcattgatgactgctatgggagtttacatgaactatttctttttaaaggactgtatttatggctacttactctcatttttctaattattatgaattttagatcttggcctaagtttaacacctttaaaattatgtagagaatactgataagtgtcagggttcatttatcatcatctcacttgggtttctgcgggtcacttacagttgacacaacggaacaaatcggtcagtttactctatagatagcaaaagccaatctaattctagcagaactcgtaaatcatgacatgtcaatctctaaatctaaactagattttggtgttttagctctgaacagcaaaaccaagtacagattcacttagaactcagtcactcaaacagggcccttaggactagatgtaattagagaggagctgtttttaaaactcagaatgaattctgaatgtactgcttccagttttgaaccagatacaggtgatttgatcagcatttggctaggcttagtgggaccatagttaaaacaattggttaattgttagggaatactctatggtaaacccatagagtagtttccccttatcttcagaggatacattccaggacccctggtgaatgcctgaaaccacagatggtactgaaacctgtatatactattttttttcacatacatacatacctatgataaagtctaatttatgaattaagcatagtaagagattaacaataatagtaaaacaagagttataacaatatactttaataaaagttacgtaaatgtagtctctccctttttacaatgagtaaataccttattatacggtacttaactattttcagaccatggttgactgtggaaagcaaaaccacaggtaagggggtactgctatatgcagtgcttaatttgtgactattatactcaataatgtagcacaattcaagtctttattatgaatcctttctcttttttattgcaaaatcagtgtaggcttatttatcattgttctttgatgcttttttttaatttataatttttgagcctttggtaattttttcatggcttaggactttagcttcgttgtccatgtcttcttttaaactgtggtaagatatatatatatatatataacataaaatttaccattttaaccatttttaaggatacattcagtggcactaagtatattcacattgttgtgcaaccattgccaccatccatctctaggaactttttttttttttctgagatggagtctcagtctgtctccccagctggagtgcagtggcccagtctcaactcactgcagcctccacctcccaggttcaagcgattctcctacctcaccttcccaagtagctgggattacaggcacccaccaccacacccagccaattttcgtatttttagtagagacagcgtttcaccatgttgtccaggttggtcttgaactcctgacctcaggtgatccacctgcctcggcctcccaaagtgctggaattacacgtgtgagccaccacacccggccggaactttttaattatcccaaatgaaactccgtgcccaataaataataacttttaccaccccttcccccattacccagtaatcactattctactttctgtctctgtgagtttgactgttctagatatctcatacaaatagaagcatacaatatttgtccttttatatatggcttattttatttagcataatgtcctcaagggtcatccatgttgtagcatgtgtcagaatttccttcctctttaaggatgaataatattccattgtatgtatataccacattttgtttatctgttcatccactgatggacgttcagactgtttccaccttttggctattttgagtgatgctgctatgaatgttgtatgcccatctcttttaaactcctatgtgtatggatatgtatatctctttctaattttgactattaaaaccaatctggaataaaacgtgttccataatcttctttagggctgtgttgaggctagcatggtattgcttaagcagtctgatcctaattcattcctatcttgattgattttagggttcaagtaaagccagtggttccaagcagcaatggactaaaattctgtggtcttgtaaggagaccttccgaatgcagcttgggagactactagtgcatattttgtcgccagcccacgctgcacaagagagaaagcaaatttttgaaatagttcatgaaccaaatcatcaggaaatactacgagactgtctcagcccatccctacaagtaagtatctcagctttgataagagaagtaaaacgtttggtgaaatacaaagtctgaataaaacaagaactgaaattaaactgaatgttcatgcctaatttataaatataattttcttaccaagcaaatttaacctaaggtctttctcaggtgctttcacacaggctcaatttaacctctgtgtttatttcccaatcttttttctagtgcctaaattaagaagttctgtttcagagtttctgtcagaaactttgtaatgtgttaacacatcttgaagtgttttatttaaggattgtttggaggctttttaaaaaagcattatattacctgtgaaacatctatattgaatagctcaaacaacagtatatataacatatctcaaaaatatatgtggtcagttaaaatagataaaaattattaatcatttggaataatcaaacccaaaatacctaaaagaatttcagagtgtataaagtttatcacttcaagagtggtagttggaaagtttaaaaggtacattaaaccatattggagggctgtttaacagtttcttaaaaaattaaacatatatttaacttgtcaccatgttactccatttttagatatttacctgaaaaagaaattaaaacatatgttcataaaaaagcttgtttaagaatatctatgtcagcctttttcataatggccaaaaactacaaatattcaaatgcttatcaacagaagaatgtacaaacacattgtgatttctttatacctgtagagagaaatctgtatagactattctacagcaccatatagactattatacagctctaaaaaggaacagactactggtacatctaccattatggatgaatctcagaaacattgagtggggaaagggacagccaaacacaaaggagtacaatctgtgattctattcatctgaaggaacaagcaaaaccaagatatgacgatagaattcaggacagtagttgtctctgtggaagggggacggtgagaaagggaattgactggaaagaggtttaagggaactttctggggtgataaaaataaggtcttattttgagtagtggttaaatggatgtatgcaattgtcaaaactcatagaaacacttaatatatctatgctttattatatgtaagttatacctcaatagagatgagagaggatatattaaaaaggataggtatcccctttaatacatggaaaacacatatcatattaggagtcaaaactatctggaaggaatacttttaggtgctttttccagtattaagacactttcaagtacactgagggcactgtcttccttttcccaagacagaagcatatttagcctgtattttccttctgtggagaatttgaaatggtgtttttttctttcctttatactcagcaaagttgctatccatcaaaattcaactgcggtgttaacagtccactttttctcataccatcttccctttcccactacttcgtgtctgtcagtggtatcattattgaatttcagcttgaaatttttaactgtggttgtcgttgactttttcttctctttctcaatccatttcgtcaccaaggccagttgtttattcacccacgaagactgaggatattatctttaacctaatagttttagcagccactgatgataattgccaagatccactttttcattaaagagttacaaaatagtgatttctctaagtctctcattccatcagcatctataagctctgactttactatagggaagaactttcccttgtcaactatttgactacgttttttttttctatttttttttttcactgttcaaggtttattgtgggttttagttagtatgacacttggatagttggttgcattgtttatatgtagatctctttacataatatggtaatgtacactactgatatatatagttcacaaaataagatcctttggaacaattatgcaccatacatgcaatattggatttatatactggatccaggatgtgactgattgggaaaaaatgttggactagacatgttcaatgaaggagccaggaagttatttatataacacacggtaaacatccatctggctcaagggccaactgcagcatgtgcagcattggcagtggtgccttagaggtgtcagaactatttcacacaaaccagtttaggactacacaagattagtaccatccagcctacagaatggtactacaagttatagctacctacaggatatagtacctacagaatatactgtaggattttacaaaccattcctatttctaaccttaggaattgatgtttttcccaatccatcttaacatcactgctttaatcacagatcagataaaaaggacaatatgcacaacctccaactaaaatcctattgtagcctagacagtgaaatagtatgacatcagaagactttaaaattgcagctctttttgtatcccccaaagtggatctgcactgttcttcaaatgggccccttcctcaggagtcagagtcaccttcacacggtctgagattccattctctcccaagatgcaaggaatgctaaggaagacatcatcctttattccaccaatcatggtggaaattgggtgcacccgcctaagattcttcattatactttctgccaaatctgccacagagagtccaatggcccaggatgtgtagcctttgagtttgatcacctcgtaagcactctcaaccacctgcttgtgaacctctttccactgttccttatctatgtcagtccctaaatctgggtgcagagtcttgagggagacaccagtaacatttgctttactccatacaggcacactagaatctccatgttccccaaggactcacccatgacagcttaatgtgtgaactcccagcctttcccccattgggtaacggaattgggctgagtccagattgcaaccacttccaataacatggtttttgggaaagccattatcttccaagccactataggtcaaagatatccactggatttgaaacaataagcaacttgcagttcgggctgtattttacaacattaggaatgatgaatttaaagatgttcacattacactggaccaaattaagatggctttctccctcttgcgatgtgcctcagccgtgatagtgaccagcttggagtttacagttacagtatagtctttgccagagacaatctttggtgttctaaggaaaaggctgccatggtggagatccatcatctcgcccttcaatttgtcttccatgacatcaacaagagcaagttcgccttccaagtccttcattaagataccgatggcacaggccatgccaagagcaccaaccccaacaactgtaatcttattctggaggatctgttcttcctttagaagactgtgaataagctgatccttgagcgtatacttgagagtatattggacttggaaacaaaaggaatcgagaatgcacgtccggcgggtgttggggcacgcggcagtgagatccagactcgtcggcagcggctccagcaccttcgctacctttaaatacagtcagtcaaggaaaagcaggataaatgctgtttccttccctgtttattaatttttggaatgatgaattcatgcccctagtagcctctaattcttgtatttgtttttatttttggagtgtcattaggagctcaggtattttaaaataaatgttatgtgttttagtctattgcagtcattattcagtttgatattaaaattaacacctctgtagattcaagttgttgtgtcgacatggcctttttcattttaacaagttaatatgattaaacttccttgttttctggcacagaagaatgtcccaggcccaccttatgcaattccttccccaaacctagaacctaacttccctcccaagaagaccttatatccttttaaggagatgatagtatttagagactacaaatctaaggactaggtatgtttatttctcctgggttgtcatttcttctcagccttttttagtggacaaagctaggaaataagtatttttttagaaagacaagtcatgagtttatactttcactttttcttggattcttttatttgtatttcttactaatgttgatatcttggttcctaacattaacataatcacttatttgccttgtctttctacatatataacattttcaaaataagatgatcaacatgatcactaataacaatcctgctgagtgcagttgaagatgtctttgtggttctttttttcttagcatactattatggttatacagtgaaaatactgtattataaaagcacttaaaatagttttctttatttggtcaggctgccaacttcaaccaattagataggtaggtaggcttttttttccagtttgttttatagttttttgggattcctttgggtttttgtttgtttgcttaattttgtttttaatcatgtgaaatgtctacatggttctaaaagcaacgttgtgaaacagcacattcagagaggttctagcttttatccctttccgctcctcttattttttccctctctgtgtaggtaactgactttttttttctgttgaagatacaagcaaatctatgtatacatgtatttacacatgtaaatattctgtcccctacttcataacacaaagaaagatagcaaagtatacacactcttctgcaccttactttcttcacttagtatatcctagagatcattattacatagtagtacagagtgatcttctttatgccttttcacagctgcatacatttaatttgtatttcatttggaatgtgcctggattttttaagccccagacttctttgccattacaacttgattctgattaactctccagcctgctgaccctcttcttttcaagataatcatatctttgtgtcttgcaacctcttcacatcctgtttatttttacagtcatgctgttttattcatattgtccaccagcacagaacacctctctctcctttgtctatctatatcctcattctatccattcatttggccatgacccagatcactctataccttctttaaaacctttctccctttctgtagtctactcagaactcttccttcttagaaccttctttgaaaagaaatattttacatattttagcactttattattttctaaggattcatgtttaacagattcaattccttaaatcagttttttaagggctgaaaataagagttttttgttatctattcccagtgacaccttttatagtccctgaaatgatcatcagtaagtgatcagagggtattaaaatgagatattagaaacaacttaagcgtttaagaaaatcatgtgtttcctttgatattcacaatgaataaaaacatttctgatagtttttcaagataatttttgaatgtcattgaataccaaactgaaatatttttaaagttatatcaagatcattacctttaagacacacttaggaaagtcttttagtcatgtaccgtttttatttatttgccaactctttaggccttttactcacagagcttctgttcatttttctcttttggtcaggtagcagctgtctctgactaatttaaaatgttgcattaaaatgagctgtactattttcaccattgcatatgttcatcttttgcttttgggaaatgacacgatgtgattcagcatgttaatttaaatatcacccaaaatgtaatcatttccagatccatttgctgacatttaatactattcacagtttaaaatgtcataaaactaaatacagtgatatttgtgtcaatgctgatttttaaagtaaaatatatatgtttaacttgttggcaacattattgtctaaataatacatactgtacacagtagaatcaggtgtaatatctacagcatgtaagggccacttaaaaaaccgtgaatgaacgtttggtttaggtctgtgctgcaaaggccaattgtcattatcttaagtaacactgtgaattttggttttagggcctgttaataaaagattggctaaaacaactctgccatggatacatacatagaattgtctgcgtggggtttgcgagtttttcaccttttgttctagggagtagtgaatgcttacaaactaaagataggttttagttccagaaatttcaccaaaggaagaagagtcagtaagttttaaggtctaaaggaagctttcccttctagttcagtttttctgtgagaaaaactaaaaattatcttcctttatcccagtttctttcctgtattcctttagcaagtcctttccaaaattctttccccaaaagctagctggctagtttgcttgctttttaaaatatattttatatgaaaaaatttcaaacatacagagactagaaagaatagcgtaataaataccatggaaccatcacctagatttaacagttgttactatttttattatattgacatcatttcttctttttctgaactattttaacatatatatagaaattatgatattttacctctaaattcttttttttaaatgttttcctatgtaacataacattattacatctaacaaaattagcattaatcctctgtcatcaaatactcagtgcataatcagatttctgtacttatcctcagaatgtcttttgtaggtgctttatttaaatcagatgcaaccaaataaatctagcaatataatttaattactactaagtaatttaaatgtaagaattaaaattctaaatgactaaaaaattattactttttttaaagcatggagccaagttagttttgtatttgtcagagttgatacataatcaccaaggtgaattgactgaagaagagctaggcacagcagaactgcttatgaatgctttgaagttatgtggtcacaagtgcatccctcccagtgcatcaacaaaagcagaccttattaaaatgatcaaagaggtgagtcaatgaaaccatagtactttcttaggagattccatcatagataaagaatgattgacactacttttttaagaacaggctatcattgatgatgaacttgaaatgattattttattttatttttcctatatactatattgcttttgtctatgtgagaaaaaataggcttattttaaggagcattttgttctctgtggtcatcagtatccattatcagtagccttcagtgaaggaaagatttttaaagtgacaagcaagctgaagcataccttgagttagaggttctttaatgaaaaagcagagtaaggaggcaagcaactatgtaaactcatcaggtttagcaaccctggttaaccattctactctaacttatgtgacctaaattatatagacacagaattataacattataacattgtttagatggttcatttattttaatattctggtctcctagggacaattgtttttcctttgttaactgggttttaaaattagtttgttgggctctgtgacaatgttaggtgagaaataataaattttatatagtatattattatctaaatcttctaggaacaaaagaaatatgaaactgaagaaggagtgaataaagctgcttggcagaaaacagttaacaataatcaacaaaggtaagattttatatgttccaaaggcatgtattttaggaatccattagatttcacatatacttttagttttaaagtatcatgttctgataaatacgttccatgtatgcttaactatggacaatcttattatttgtttagtctctttcagcgtctggattcaaaatcaaaggatatatctaaaatagctgcagatatcacccaggcagtgtctctctcccaaggaaatgagagaaaaaaggtgatccagcatattagaggaatgtataaagtagatttgagtgccagcagacattggcaggaacttattcagcagctgacacatgataggtaagctgcgggaggtcagttaaaattgtcttccatgaagatttaagatattgatgttaaacggaatttgtattccggaattcagactcataaaatcatttcattaaacaattttttgtttaatcatttgtgatgtttttttcatcttaaagaataatcatatgagttttttttaattcttgaggaagaaaagtaatgaggggggcagtagctcatctagatagtaaaattagcttaattttaaaatatggtctgtaaaagaatagagaaatcactgaaacaggatggttgagaaaaatatatttttctaactaatttaaaatatgtattacaaataacaaaaagcgggaaatcaaggtattattctctaaatttagttaagataacttattcatgtgactttggtgtactaaaatacactaaacattagacactaaagtaaattccatatggataaaagaattactcgaaaagtttataaagtagaagataataggatatttgtcaactctttgaaggatagatgactttctaagctcaaatgcaatagaagaaactgcaaataaatcaatggattttaaccttaattttttccagtgtatttaacaaccataacaagaacaaaaaagcctggaaatatattttcagcaaataaagttatttttattgtttgaaaaacttacacagattctaaagtaaaatattatgatcccagaagtttgaatgagcaaaaggcatgaacacattcctcacataagacaaatgaattaccaaacacacgggaaaatattcaatattgctagaggctaatttggttttctagaacctctagataccacattttactttttatgttaacaaaaattttggctgctaatattcaccgcaggatattagctgtccttactcagaactttggtggcattgtacattttgacaatatgtattaatcatcctaaaaacattttacttctagcttcagttatcctattttagtgattctatcctaaggaaaatattcgaaatatggaaggcaggccaggcacagtggctcacacctgtagtctagtactttgggaggctgaggcgggaggatcacttgagcccaggagttcaaggctacagtgagctatgaacatgccactgcactctggcctgggcaacagaatgagaccctgtcaaaaaagaaaaagaaaaagaaagtaaacataaaagttttcatctctgcattatttatgctagtgaatgaattagaaacaagttataaaccgtaatatggttaaatacattacaatgcatctacctctttattgggcagccattcaaaatgatgagataaagataatactgtttcagtaaaataaggcaagttatagaaaaatgatcataatgatcataactacaaattaaaaacagatgcacgttttaaaaaaaaaagacaacaaccgctaccagtattttggtatgtttagggtatgaataagggtatttttttctcttatttatttctaaaaatgtacttaatatgtttttcctgtcttatttcatctaagataaaatttattttaaaatctttttaaaaatgtgattcataccacagaaagaaattgattttatttgtttcattagagagtaggcaaaatgaggccaggtgagggcgctcacgcctgtaatcccaacactttgggaggcccaggtgggtggatcacttgaggctaggagtttgagacaagcctggccgacatgatgaaaccccatctctactaaaaaaatacaaaaattagccaggtgtggtgggagcctgtaatcccagctacttgggaggctgaggcaggagaatcgcttgagcccgggaggcagaaattacagtgagccaagatcacgccactgcactccagcctgggcgacacagccagactctgtctcaaaaaaaaaaaaaaaaaaaatgcaaaatgggaaatgtaaaaaattaatttggaaaaaaaatttacctaaccatattaaatccagcatgttgtattatgttgctaaagtgttcatagtagtcattacatatcttttaaaaaatttaatagttgaaagaaactggaagcagagcttgccttcaggcgaggaactgggagactgggattcaggagcaaaaagacacttagattttattacttctacttgtatatgcattccctgatcaaatatataaacatttggagtttttaaattaacagatcagttgtgacttacttactcaatctctataatgattttttttatagctacaagtcctggatggtcacttaaaacaccctttaatctttttacttgcagagcagtatggtatgaccccatctactatccaacctcatggcagttggatccaacagaagggccaaatcgagagaggagacgtttacagagatgttatttaactattccaaataagtatctccttagggatagacagaaatcagaaggtaatagtggcttcttgactcaacatataaatatagcagagaactatggtcattagataaagataatatttacttttctcctcaacagatgttgtcaaaccaccactctcttacctgtttgaagacaaaactcattcttctttctcttctactgtcaaagacaaagctgcaagtgaatctataaggtaactttgaatcaatagaccttcactctttcatgaatatacaacagcttattgtagtgtttatgtaatatttattttatataatgccatcattttcagaaaaatcctaaacaggaaaggctcaagggaggacaaggttatatggccaaaatccaaaaggaaatgacatttctgacagcaagagttcatgggatttcagtcatcatgttctggcccttgttagtttacatacacacacacacacacacacacacacacacacacacacacacatataaatatgtatatatatacacatatatgggtacatatatatatacccatatatatgtatacacacacatattttgtaattgactgtttaacatctctatctattaatatagatagagctgctggtggtatcatcaagcagcaatataacgtagtgattaaaggtttagattccagttcctgctcttactagctctttaatcttaggcaagttacctaacctctctgtctcagttacctcatctattaaatgaagaaataataataggtatcatagcgttgttgagtattaagtatgttattatatattaactattgatagtattatcattgcagttattgtggttgttattatacccatttcatagatgaaaaactgagacacaaagaagataattggctaagaacacaaaggaactttctgattccaaatcctctgtttttcctagaatactaggcttttttaaaaatgtatttgataaattaccttcataataatgtaaataatacaataatagtatataacaaataaataatacaaaataataatacaaaaataaatagagcacacacaaaaaatgtatctgaagtatcagaggcatgaaacaatgtttgcttatttattagaaaatataaaatattgatatctcttttaaataacttaatttctatattctgtctacaggttatagggattattagccttttctaggcgtttcagtcatttctcttctaatagaatgctaaaaaggagctaatattttcatgtgggtttcgacaagatacctcatgctattggaactctatctagtctgctttgcagaaatcttttactaggtaaaataaagcatatcctctctgaaattggtcagaacatttagtcatagtaattttaaatatgttttgacagagtgaatcgaagatgcatcagtgttgcaccatctagagagacagctggtgaattgttactaggtaagtcaaattttgaagaattttgcacatattcaccctgccttatttgattcttagattatttaaagtgttttttgacagcatgccattaaattggataaactttctgtagtatcatataggctaatttgccttaacattatatgtaattgcatatgagtcatgaatgtgaagaaatgatatcttgtgttctgaaaagcacatgaatagcattttagtttttataaaattgtttcttcatgatatgcaaatttatatttaaccatttcttttattatatgccaatttagattttttaaagtgaaaaattgttgatatcttacctactattttatcagatataactgtccataagaaatatgtctattttaagattgtccataatttatattctctattgtgcttctgagagaaaggacaagattgttagtccatagatacctatatagttatatttgtttgaaaattttattctcaaaatatgaaggaaaacaattataccacttgatctctattcccttaaagaatcaatctgtatgctgtaggctaggttctccaagtgtgagaaccctgaattagtagcatcagcatctcatgggagcttcttagaattgcacattctcacgcctcagtccagacttgatgaatctgaaattctgagggtggggcccagcagtctatgttctgatgagccctccagtgatttgatgtaccttcaaattcgagaatgaatgttgtaagctatagcctccaaggtccaagatatggagcttcaagcctgctgggactgagccccaccgtcacaaggatggagatagtacccttctctgagctagccatgccactacttcactacttcactacttcactactcgagggtgatgagcatgcagggggcggaacctcagagaagttcccaacattttaaaacacgatgtagggacatgggttagcaacagccagcctatgaaacaggaaaaagttggaggctatgtttagggcctactctaccctattgagtgtctcagtctgcaaaataattaaggatttccctttggctagataatttggtttaccacttgacttcaattagtgtggaacaaaataaagcaaatctatatgctagtaatgtaagaataatggtaataataaatagccaacatttatttagcactgagcacatatgcattttgcatatattctaatttaatttccatagtagctctgtgaaatagagctccctgcaacctttttttttaataaagaaattaagacacaaagaggtaaagcaacttgcccaagacttcatggatactattcaaaaatatttattgagtgccaggaactgtgtcgaggtagtgagattcaaattcagaccaaaggactccagagaccatgcattaaaccatgaatggtagtgtgcacatacattttaaaacccttatatccaattactttctgcaggtaaatgtggaatgtattttgtggaagataatgcttctgatacagttgaaagttcggtgagtagaggcttaagtctgtatttacataaatctagacagattccaaaaatgtatcaattcagtataactagagagaaggaagaactattagagttcattctttgtcactctatgtatagattggtctgagttccaaacatttttttaaatataattttaaaaagaagactgtaccatctcctctggcttatggcccaagtatcatagcagttaatataagtcatattctaaatgctcctattatatcaatttatgttcattccttcttattactgtcctccgttgcaacaaatatctattccttgccactcccagttcactatcaagtacctttgccttcagaaagaaaggaaaaatattaaataattgaataacttaagtaattctgatattcacatagcttaataatgataattgttattattctagacagactgatattaatcagaaaatagacatattttttgtataataaagctttttatttgaattatcttttatgccattaaaatattttttgagattcctgtaataggagaaataagctttttgtttcagaaaagttctaaagccgggaattcctaaggatatactaaatgagattatgtgtggtttaattactaatatatattttattttaaataaattaggctgggtgcagtggctcacgcctgtaatcccagcactttgggaagctgaggtgagtggatcacctgaggtcaggagtttgagaccagcctggccaacatggtgaaaccctatctctactaaaaatacaaaaaaattagccagttgtggtggtggcgcctataatcccagctactcgggaggctgaggcaggagaatcgcttgaacccaggaggcggaggttacagtgagccgagatcacaccactgcactccagcctgggcaacagagcgagactctgtctcaaaaaaaaaaaaaaaagaaagaaagaaagtagtgagtgaaaacatgaagtttggttataaaataaatgtaaaaaaaaagtcatgaaagtatttaaagtagtcagaaatatgaacagcattcttttctcatttatatagcaattaccacagggtatgtcccagatagtaaaatatagttatgttatttttcaagatggatccttttatcagccaaggaatttaatagttgatgtatgagacaacttttttgtatgtccaaaagatgacagtttttccccttaaaaattctactcaatttgtgtttaactccatttgacatgaggtgacagaagagtctgagtccacctgtcgaatatgttggtttattttcagtgcttgaggatacattcacaaatacttggtctgggaagacaccatttaattttaagtcaacttgcatgctataaatgtgttttatatttaaataaagaggaaaatttttttttcaaatctaaaaatgcccttgcttctcaatagattgaaagatccttctttcctatgtacttttgtaatgttggttcttcttatataacatttggtatcttgcgttgtgtgtgcaaatgtgtgtacaaatatttcatgccccctttttgacccatacagatgtatttcatgcagagcacttagcagagtaccttgcgcatagatgttaattaatatatgttgaatgaatgttgaaactaaacaaaggaagaattcagttttaagtatgaaaatattacattttcattaagacattttattttattcataatatattccctgcctctacttataaaaattattttggaccaagaacaatagtaaaacacacatagagtaggataatctgaatctaaaaaaaaaaattaaggttttggaaagataaagagcctaggataaaatagttcttggcaattgagtcctaaatttgctctgagcttcctgttagtcaacacagaagagtaagtaaatgcaatttttttaaaaggaaaaaaactgatttaaaaaagaaaactaggatgcaggttgatttgaggagataaattctagctagttttaaactttagtagaaacttttcattatttctctattaaaagcattaagtagcataatttatgtattcagttacaatttacaaaagattaagatgcattttttttaagtttttcttgattttgtactttgggagggacctagtgatggtaggatgtgtaggccctgtggtccctacctcttcatttcagaatgtggggatttgtctgagtacactaggattaatactctcaagcagattcaaccttccagtgattcttttctcatcttcttttcttctgttgaccacctagcaggggaatgtatctatttggtatgtgttgatctgtcagcttacatttagtgagtggggctttatttgcaggaatgccccattagttccaggaatgctcctccagagactctgctttccctttgctgaatgactcggaagcatgagaactgtttcacagctcgggcgtttccaggccatccagacatggatttaacctaaatctatatgatggcaggcccacagttatgaattctcagagagaggctttttttctatgctctaggctccaggccaaaagagacaagcttgcttcctggttaatcctctttatttttattttgttattttttatttttttaagacagagtctcactctgtcactgaggctggagtgcagtggcgtgatctcggctcaccaaaacctccgcctcctgggttcaggtgattctcctgcctcagcctcccgagtagctggaactacaggtgcctgccatcactcccgactaatttttgtatttttagtagagatggggtttcaccatgttggccaagctggtcttgaactcctgacctcaagtgatctgcctgcctccgcctcccaaagtgctgggattacaggcatgagccaccgcacccggcctattcccctttattgatgggcacatttgtttgtctaatctttcattaggaacaaatcccttcctaggttttagctttctgaagcaatctcaattccataccctgattctaggggcccagggcctcatcttctgtcctcaagttgctgtgaacctacgtcaatttgtttctgaaactggggtatgtgcatacatgcatgcatatgcagacacatacaacagagcaaccagagtatcactccctgcttagtgctgattttccagttcctctacatttttgacttctggggatgtcatttcccttgttttcttgcaagctcagctatgtatttaaaaggatatttgcttagtaaaagaagccaaccttaaaaggctatatactgtataattcgaactatatgacattttggaaaaggcaaaactatagagacagtaaacaaattagtggttgccagagattggggagaggaaaggagggatgagtaggtggagtaccgagggtttttggggcaataaaactatttggtggatacatgtcattatacatttgtcaaaacccatggaatgtacaacacaaagagtgaatataaactctggactttaggtaagaaaaattgtagcaatattggttcatcaattgtaattagtgtcccacaccaaatgcaagatttaataatagagaaactgtgagtgcagggccaagggaggggaggatacgtgagaattctgtattatctgctcaattttctgtaaacctaaaactagtctaaaaaataaagcctattttttttatttctaaattttatcattcattttgaggtgttttgcattgggagagttttcaggtaatcttatctgccatctgccacaaaaagattttctgttttattttgatgctttttaaaatctaaaattaaagtaattatttatatttccggtaaaacaaatatttttgcctatttctttgtcttagagccttcagggagagttggaaccagcatcattttcctggacatatgaagaaattaaagaagttcacaagcgttggtggcaattgagagataatgctgtagaaatctttctaacaaatggcagaacactcctgttggcatttgataacaccaaggtaaattcacccttattaattgatatatattgtttaagtgctcatgggccactgtaactatactcatactgattacatgaaggtttactgaaatcgaataaaattgccatgtttcttagtcctgattaaagtgaagcctttgttatatgaggattgtctttgacctccacagtgaggtaaattctgattccccaaaatgactgaaaggagtaatttaaacttgctcagtgctgtagcagggtccatctttgacaaactctcttgacctctaatcccttcggccaccatttctctgctctcctttatggaaaaactgttggggaaagttgcatatgcttgctgcctccagttttcttttgaaatgcttcagacagacttctcaccactctcgtcagggtcatcggtaacctctatgttgctaaacccgtaatgtcataatctttctttgtccccattttacttgacctattggcagcatttgacccagctgatttttctctccttaaataaaaccttcctccctgggcttctgggttaccattttctcttagttcttataccttaccagccattgcttctcagtcttggttgcagacgcctccttggtgtgttgcagggctccttcctcagacctcttctcttctcatccagtcttatgactttaaaataccatctgtattctaacaacttacacatttatgtcactacccaaacctctcccctgaatgccacactcacatattgtaactcccgactgatgtctccatttagaagtcactaattgacatctcaaacgtaacctgtacaaaactgaacttctaatcttccccccataatttccttccagttttctctatctcagtaaatgacaactccatctttccaatgcccaggccaaaactcttgagattatccaagactcttgttcttctctcataccctgcatacactctattaataggttctgttggctctgtcctcagaatacatcgagagtctgactgcttccactgctaccatcctggtttaagccactatcatttcttgccagaatcatttacagtagcctcctaactggccttcctgcatccatactgtttctgaaatcaaataaaaattgccatatttcttagtcctaattaaaggaaagccttggttatatgatgattatttttgacctccaaaattgtgttaaattctgattccccaaaatgactgaaacgaagtagtttaaacttgctcagggccgggcacagtggctcatgcctgtaatcccagcattttgggaggccgaggcgggcagatcatgaggtcaggagttcaagaccagcctggccaacatggtgaaaccccgtctctactaaaaatacaaaaattagcggggcatggtggcacatgcctgtagtcccagctacttgggaggctgaggcaggagaatcacttgaacctgggaagcagaggttgcagcgagccaagatcacgccattacactccagcctgggcaacagagtgagactccatctaaaacaaaacaaaacaaaacaaaaaacttgctcagtgctgtagtgactttcagctacaatgactttgacaaaccctttcttgacctccagtcccttcactaccatttctctgctctcctctatagaaagccccttagccccccttcagattattctcaacacagcagctaaagtatgttggatcatatcttttctctgctcagaatccttcaatcactttcatgtcacattcagttaaaggcaaagtccttccaataacctgataaagccctggataatctcgtaccttgttacctctctgacgtcattgtctgctgttctctccctcgctctgtctactccatccatgccttgaatgtcaggcacaccagtgcctcggggactttgcattcattgttgcctggaatgtttttctccttagaaatcctaatgatttgctttgtcactttttcaagtttcctgatcaaatatcttcttatcagagaggccctccctgactctataaagtagccacccctccctctccaccaagcaccccttacctcctttactttggtctgtttttctctataggatgtattagcatccagcattttctgcctctccccagtagaatgccaagtctttactttgttaagttccagttcttcagaattttgaacactactggtatgtaggtattcagttcatatttgttgaataaatgaatgcctccttttccttccagggcttggcttatagtctgtcataaatccccttccgtggaccttagcgctaacaattggcaaacttcagatttaggctacaggtttaggatgttctattctctgtggttttgcctattccacaactaccagtacatttcctcattaagttcactctctcattatccatatctgtggctcttcttcctgtgtctgaagcatatacctgcttagaatgggtatttcatatctgtttttagcaaagctcgtcttgtctgtttttttcatttattagcaatcattatttaattgctttaaaagaaccaataccccttttctgtgacaaaactattgtgaatctctaaaaaagagtttatatatgttttcaatcagtagtgaaaatcaaatatcctatttacataggatactttatttaattcttatgagagaaatattatcactcccatattatagacatggtaactgtagcacagaaggttagcaggaaaatataccagatctgtccaattcagaagaccgtgctgtttctactacaccatattgcatttatttagaagaaaactcttcttttttccttatttttttttcttttagtatctgtgtcttaagtgacttttctatacaaactttttcttagaaggtttttattaacatatttctgcagcagtaaagcatagtggtgaagagcccagcctctggaggacaacctggacttgaatctcagttctctacccattaatgttactgagaaaaaaatctttttttggaggacatgagatttgtaacatgtctataatgtcatgggttctttggagaaaagtgccaataagactaaaaataatatctgggtttttttcttctccttcccttttaggttcgtgatgatgtataccacaatatactcacaaataacctccctaatcttctggaatatggtaacatcaccgctctgacaaatttatggtatactgggcaaattactaattttgaatatttgactcacttaaacaaacatgctggccgatccttcaatgatctcatgcagtatcctgtgttcccatttatacttgctgactacgttagtgagacacttgacctcaatgatctgttgatatacaggtaagttaaaagaatcatcacctttagggttcatccatccatatgttgtatttctttattaaagttttcattatgaaaaatttcaaacatgcacaaaatagaagaattatataagaccccacatacctatcaccctggttcaacaattgtgaattatgaagatttttgccaaacttacattaacttttttttcttatttaaggcaaattgcagacatcttgttatgtcacttctttgttctacagtatgcatctctttaaaaaatagaacatctcaaccacagtgctattatcacatgtaagaaaattgacaataattccatgatatcatctaatatctagtccatttccaaatgtcccctgcttctctcaaagatagctttttatagttggttgtcttgaatcaggtccattgtcatgtttggttgctatatctctgaacatatacctagaatagcctttttttttttttttttttttttttttttgagacagagtctcactctgtcaccaggctggagtgcagtggcgcaatctcggctcactgcaacctctgcctcccgggttcaagcgattctcctgcctcagcctctgagtagctgggactgccggcacctgccaccatgcccaactaatttttgtatttttagtagagacagggtttcaccatgttggccaggatggtctctatctcttgaccttgtgatccacccaccttggcctcccaaagtgctgagatgacaggcatgagccactacacccagccagccattattttttatgtgtattttttctctttattttctcctgacattgacttgttggaaaaaccaggtcacttattcttttggaggcttcacattctgtattttctgattgcttcccatgacgtcgtttggtttgttcccataacccctgtatttcctagagactggaaaagtcttgcttagtttcaggttcaactctttttttggcaagaatcctttataggtggtgatgtgagctttatatatattttccttttttttttttttatcattctgcatggttgagaggagtgagctttatattgtatcatatcaggaagcctatgatattccactgtaatggtgctcagtttgatctgtgggctcaggctcccattgaatttgtacctaatggtttcatccattgatgattattgcttgaatcaattatttcactagaggttgcaaaatgttgatttcccattctctcatttcttctaaatttattagaagaaaatagacaaggtgagcctaggatgttttgttgtgtcagaaagcgaggaaactaatatggtcttgtcaaaaggactcagaagttggccaggcgtggtggctcactcctgtaatctcagcactttgggaggccaaggtgggctgatggcttgaggcctgaagttcaagagcagcctggccaacatggtgaaaccctaactctattaaaaatacaaaatttgccggccgtggtggcacatgcctgtaattccagctacttgggaggctgaggcaggagaattgcttgaacctgggatggggaggttgcgatgagccgagattgcaccactgcaccccagcctggataacaagagtgaaactccgtctcaaaaaataaaaatagaaaaggactcagaagccaacttgaagtgcctctcgctgccaaagataggatagtctgagaataaaaagaataatgactgcaattagttgaaacacatggaaataaaaagaaacgtaaggtcatagtgatactttttaaaaggccaaggaaacacagtgaaacaaaattcattggtcccattagaggtaatagggcaccaattccttactttgaaatttggcaattaaaggaacagaattcagcatttattctgcctttcctgaatgaactgtattttagagtaaccaaatagtcctagttgatgagggaatattttgttcgtttaatatgaaaaaatattctgatgtttagtttaaagaaaaatggactccaaatatttcacttagtatactagagtatttcagctgtaagtgccaaagagtgggcctaattcagacagttctcaagaaatcagatttaagctgggcgcagtggctcaagtctgtaatcccagcactttgggaggccaaggcaggcagatcacctgacgtcaggagttcgagaccaactactcaggaagctgaggcatgaaaatcacttgaacttgggaggcggaggttgcagtgagctgagatcatgtttgggtgacagagtgaaactgtctgaaaaaaaaaaaaagtgaatatgcttgcacagataaatacaaaaacatctgggtgtgtatagaccaacatgtgtggcctagggtaatagtattgtggctgatttttagtttattgtttgctcaactgtaattttgtatttttcagctacaactattaacatagcttgtgtccaaaaaaaaaaacccctatttatactatctataaaaaattgcaggccaggcgtggtggctcacgcctgtaatcccagcactttgggaggccgaggtggatggatcacctgaggtcaggagtttgagaccagcgtggccaacatggagaaaccccatctctaataaaaatacaaaaattagccaggcgtggtggtgcatgcctgtagtcccagctacttgggaggctgaggcaagagaatggcttgaacctgggaggcagaggttgcagtgagctgagatcacgccacttcactccagagtgaaaaaaaaaaaaatgtaggcagccatcttaagtgattttgctctgtttttagatgttaatttgtatctattctataaattgtttttgctttttaacaaggtttttatgattagaaaaatctcaaagacaaaattagtgcatttaatacaactaatttcaacattcctagaaaatagtaatttatattaaaaaaaaaaagatgtatcaacatgtggttaagcagacctggtttgactcactgaaatgtaggcaaatcttgctgttggtctagttatggtgctgcaggttgaaatccaggtggtcccatgcctgtgccagaccagatggttcctcagccaaaagagcctgcccttcttcatcagagctttttcttttgctccttcaagtgccacacagggacaccacatgattctgtagcttgtaaaagtgaggattcattcctggagggatgagaattcattctcctgcttcaaggaatggtgtcatgtggtgttcacagaatgtgaacaccggcactgacagatttgtacgcatgcatacatactctacactgtgcgcaatggtattactccccatctactaactaggtagcaaaatatttatttcagttctcagtctccaaatctcagcttggtcattttaagcacgtgttgtttcttcagttttaactaactaggctaataacacagcatcttcctctgttcctaagttctgtcgaaactgcccttcattctacaccgcctaactggatgtagagtctggaaaatgggacactaactttcagggcttggtctaggaatctgctcccacgagcaacatcagttatgactctagaggaagctgcagaagtaagggaaagaaggatagtagtagcccttcttatttaggctacttgtaagtcaggaattcctaatactggcctggctctgtggggaaaattctaccttaatttctgaaatcataattttgaatggtgactgttagttacaaaacaatatgtttaagcagagaaataagggtggagcattttgttgaccacttacctacttacaagatgcagacatctagggagcttaatcttgacagtatcaaaatatttaatttttaaaattgtccttttcttgcagaaatctctctaaacctatagctgttcagtataaagaaaaagaagatcgttatgtggacacatacaaggtagcttttgtttttactcgtactttattaaatgaaaaattgtgttttgttttacagacttgtgttttacctaattttaaatttatactatggattttttaccttcttgtactaggattgacagacaactagaaatcattatgtgaaatgaaatatcattttctatcctgattttctgagaacactttgcccagaaaaagaatacacttattttggcataaattgaaagccagtaactcattgtttattccagtatttagtagtcacattccttataaaaatcacaaagatttccagggacctgctattcgtatcccctagtgttatttatgtaatagtgttaatatatttataatgtacccataaccattagtcatattcaggaaattatgcattggtttattaaacaaaaatttatcagattttaacattttaaaaataaaatgaattacctttttctgtgaaattaatattaatgaaattctattggaaattcaaaaatcacaatagctacgcattacattcttcacgagtatcaagacaggagcaactgaaacacttttctcatattcatcacattattttatgccacagttcctgaaacatccctctaagcatcttatgactgtcactacttgattcttcagcagttgaaaatgcgtcattgctgtggaaatcaagaagtaactcttgaaaattcactatacctgactttgttatcagaaccagacagaagctatgggagacaagaatagtgacagatattaaatgtttggttgaacttcctactttatgatgggaagataggagtagtgaaaaatcaccatattcttttttttttttatctctgataactgcactgtaaaacagacttaaaatgttatattattaccaataatgtgacatagtttttacatttctattgcatttctacttctagagaagcagttctctagacagcatagcattacatcttgaaactcttttgaaatgaagacatctctagtgacagaagcacctctcatttgttgggtgcttgatcagcttagacattatgagccattagttaggaggtggagtgctcaaagttaggtaggttttctatgagggaatgaaagagtgaaggtggagatgagaaatgcttctgagtgtttgggtcttagtgaggcaccaaggagaagactcccagacactcaaggaggctgaagtctcctgggtaagagtgggagggccagccatggagaatggcctcaaaggggtagtagagaaggagagaaaaaaaaacatccagcacttttctagcgttgcctggagcccacaatcatgaattctctggattcaccgtttctttcagtacttggaggaagagtaccgcaaaggagccagagaagatgaccccatgcctcccgtgcagccctatcactatggctcccactattccaatagcggcactgtgcttcacttcctggtcaggatgcctcctttcactaaaatgtttttagcctatcaaggtaagaatttaataactgcctaaaaagtcatgttgggtcatcagaaacaacaacaacaacaacaacaacttaggactgacattttaagaactattaagactaatcaaactacaggaaaaagaattctatttattccttgcccaaagtgctcctcaaaaaagctgtagtaagccaaatcatcttgctaatgtctcaaattttagcttcaaattaaatgtctaagtttataaaaatgcaattcactttttaaaaattaagatataattcacaaaccataaaatttacccttttaaagtttatgcagttcactttttaaagacattctacctaatacttatttcaaatccagtaagttacctttggagcctatgtacattattgcagtttattataaaggcaagtacattattgaggtttattataactagttaataaaagacgcacaccggcaacttcactgtggtagctttgtagttaataatcttctacatcagcattttaagtgacagactggaggcctgaacatgacttagataggagtgaatttgtatttttgtggagattgggacatactcacctgtagtttctaatgagaacggtgatattagttctatagctgtttctcatggaatccagaatactttgaggaatcattatccattcttttactcaaccattcttgaactacttcatgctttttactcatgtacaacctattggaggaatgaatttgtattcactcttattggtctataaaaggggctttcctatgtttgtctctctgtaagtaaacagaacaaatgttctatatgacagctgttcaaatatttgaaaattgttggcctgttccctttctctctctctcttgtttttcccctggctaattatccttggttaatttgacggcagattgagggcctcctggatgcatggtcctatcccagctgctggaaggaataccaaaaaataaataggacagttttgtactaaataaagagtttttaaaaccaatgtttaagccatccttgtttgctgtggtttccaagcctgtcactattctgaagatctttctggacatgttctgatttgtgaatgctcttgatgaaaagaaaaaggcagtcaaaataaaaaagaatatttcagatgtggtttgggcccctacagtgtttaacagaactattacctccctccatccaagactacatttcatttaatgtagcccaagaacccattaatataaaactaccaatcaactaaaatttatcaatatttttattcatgttactattatgaatgtattcatatattatgttttcttcattatgtatttatgaatatattttgtttaaaacctaggactacctcagtctccattcactttcatctcattagtttcaagtgatatctgttggcttttgaatttatttcttggctttggtttaatgcagggattctccaccttggcactgtagtcatttcgagctgcataattcgtttgtcatgggagctgccctgtgcattgtaggacgtttagctgtatccctgttctctccctactagtgccagtggtaccaccaccacccacaccccatccccccagttgtgagaatcaaaaatgttgctagacattgccaaataacccctggagggcaaaagtgctactggttgagaaccacaggtttaatatatgcatattctagataatgggaatttgtagtagtactgtttaataaaatgtaggaaaatacagagaatcttaaaatctgaacagaacctacccaatgtgctactcttgttccgtatttccttagtcttagctccagatactttgacctcaccatagccttacaaaattaccttaatttttcttttagtttttttgtttgtttttgagaattaccttaatttttctgaattccattttgattgataactttttctactaagttagtaggtatttctttaagtggccctccttactttctgagaaaaagtaaatgtttctaaaccttatttcttcccagattttttttagtggccagccaatgccaattgactcaacagaatagatgagaaagtaatacaagtgacagaagatgttgctcagcagagcaactaaggctgggagaagaaacctgatgctgcgatgtgtttgtggcagtctccaaatgaaaagatgtgttcaaatttcaacaagttcagaggagttttagatgatgcaatatggttcctaagaaacatgtaaactgctactgttttcagaggctagcttttggatatcatttaatattctaggcctttccctatggctagaaagtctgatcattgttggcagaaaagagagtccaaacttaattctttattattaatagtctaccctggaaaaaaaatgaacgaaagagtgactatgcttatttttattttcattcacaggaaattttactcaattctttagctcagagttagaacaccaaaaaacaatgcaccgtaacctacgcacccccccgaaaaaaaagaaagaaagaaaagaaaggagaaaaagtagtcttaacaattcaaagtgaaggaatcatgcttcctgatggggaaaaaactgtttgcctacttgaacttaaatcttccttcttcattattcattcattcaataaataaaccatgattgaatacccattatgtgcaaggtgtgggtgatatcccagggccctgtttttgtggaactttcattctactttgatagatagacgaaaattaaacaaatagatgatataaactaatctaataatatatattacaaaagcataatacagatgaaaaatgtaatatgatctcaagtttatagaaatatttattttcaagaacatgaataacttcttttaaactatgggcaaacaaaattagcattattttaatctttttgaagtggcaaaagtaaattaattatgataggcctcaaatagaattaggtctttgtgtcttaatcgtattatttgtatttttttatagatcaaagttttgacattccagacagaacttttcattctacaaatacaacttggcgactctcatcttttgaatctatgactgatgtgaaagaacttatcccagagtttttctatcttccagagttcctagttaaccgtgaaggtatagcaataaattatttttaatttatatttctgagggcttgtggttattttgtaattttccaaaaatgaaaatagcttttttaagtcctaaaaatttttgagtccccaaataagagaaaatgttttttattaagtatataattctattttcaaataagcttgaggattttaagtattttataggactaaatatgtttggaaaactgtaacttttaactattaaagttatttgtaaatatgtattttaattttattatagaaattgctttattcttttttctgaatacaaaagttataatgtgctaattactttaaaaataagaggtatgactttattgaaagcaaaatgtaaattaactgaaatctcaattattttatgaggaatgaccaaaataaaaataaaatactctgcccagaattatctaataaccaaaaggaatactggagtataaaatcaaattttctgtgatgccaactaacagtcttggctgccaaccttagctattcttaaatagaagagcagctaaccctttaaggggtatctttgggtcattttcttatattacttaattctataattttatgtgatccttaagagcatatgaaacagctttaagaagttggtgttgggcaaattacattggaattttgttgtatagtatctgtgtctctgaggttgtttgattgattattgaatcatcagtagattcatgccaccctggagcttatttcatagtgttgctcaagtgagaaatgcctcagtcaaacatcagcacctgcaatttggggcacctgccttgaagcttttcatttaggactcctgtttaaatctactccttgttttctctgtccatggtctcttatatgtatgttctagctatctgtggctgtataacaaataatctcaacacttaatggcttgaaacaataataaatttattatcaatcacagataataaaattattttttattggtcagaaataagaaattggtcagaagttcagaaacagctcagctagatggttttagctcagggtgtctcatgctgttgccttcaggttttctggagctggaacaggcaggagatgaagccttaggcagctggagcacatcaccctctcttcatgcaatgtcagtgttttttcatgtggtctctctgtgtgggctagttttgggcttccccacagcacggcagccctggatgtcctacttggcaactcagggttccaaagacaagtgttccaagagggagacgaacagaggctgcatggccttttccagcctgttcttagcagccacgcagcatcacttccactgtattcttcctattcattgaggcagtcacaagtgtcttcccagattcaaaagaaaggaagatagactttgccttgtgatggagagtagcaagattctggaagggcatgcaagacaggaaatgctgttatagccatttttggaaaacacagttttttacagcgtatatcatatcatttcctatcagtgttcccctgggactctcgtatgtcagttgtctgctttgggtcaggagtcagatgttccctcagaacacctgaaagttgggaaagattgagtttgtacaaatgcccttatgcaccccatccccagcccattcccagatgcctcattcactgttaaataaataagttcctgctgctgccgctcctgaagccacacacatggagttctgcaggtgctcagccagtccatcctaaatcaaccatgcagctgctctgtacgatgactgctgagctttctgagatgctcacatccccatcccatgtgaatttatataaacccttgatttatattccatatcatatcatttcaaaatacttcccaagtattttggtgaagatccttctaactgtttttacaagatcaaaaagtagacagacagcaacttaattttacatggaacttaatcagcttttaaaaggtcatttttaatttttgttatggtgttcagcaaactagaaaatgtagcacaaaaagccatttctgtttaaaggtaacatttcctttaggataatttttttaaataaacacttctgagatttttgtttatactgatgagacaattagatattagctcatttacatcacagaagaaccctcttatttcctgtgttgggataattttgctatctacaggaatgcttagtagaaaggaagtcagaacagacccatagacttataaaattaatagactatggcaattcattctaacaatgtgtatactttatattagttgagtttttaaactatagaatactaatatttactaaatataatcttaaatttattaaaatgttaataccaatagtttagaaatgcttctacaaagccttagtttgattctaatcaggtttacaattgaatagatatttaagtacttaatgcccttgaagatgtgaatagtcagaatattggaattagtaggcaatggttttctccttttcttcaatatgttgtaaagtggtagaaggataaagttgaaagatctcaaatttaattatgatagcattagctcacatagccctattagtaggtacataagtagatgagcagtggtgtttcttattcaaaatgtaaatcctccttgctattcccttttttggttgtagcacacaaacagctatttttgtgaactcttaagacctgctctgtagctgaatgaaacttgctgtgggggagttaaatattaatattaatcttctcttttaggttttgattttggtgtgcgtcagaatggtgaacgggttaatcacgtcaaccttcccccttgggcgcgtaatgatcctcgtctttttatcctcatccatcggcaggctctagagtctgactacgtgtcgcagaacatctgtcagtggattgacttggtgtttgggtataagcaaaaggggaaggcttctgttcaagcgatcaatgtttttcatcctgctgtaagtgactcttttaaaacaatctgtatttatataagatagaacctgaatattttaaggttagttgttcggccattcctttaaaacactcaagttatcaaagagaattggtagtagcattaaactgtcacctaagatttttcaggttttatatttcctctctttaaaaacaagatactatctttttcagaggtgccccaaaacaatccccaggtttgatgattcactaggtggacttgaggattcagcatatagtcatccttccagctcaggtttattacagtaaatgatacaaagtagaatcagcatggggcaaagtctgggagaaagcaggcacaaacatccaagaatctacccctggtaaagcacaaaaagcatactcagcctcctccagcaacgagtcataatgacacatgtgaaatgttgtctgccagggaatctcattagaggctcagtgtgcaagacttttattgagattggcaacgtaggcaccctctgcctcgcacatactgaaattccagcctcagaaggaaagcaggtgttcggtataaactgcattgtttgtacagtttaggcacagtaagccactcttatcagttagggaatggtaggacctctcctgaaatccaggttcccagacaacagccaagagccaactttgcaagcaggcctttccagagatagcagtcaatcttgctatgttaactcttttccgcacactatcctacatacatgttctactttaaaatggcaccatgttttcttattacagaaaaagtacttgtactttgttagaaaaatgtataaaatacagactagcaacagggagaaattttaaagtccactttaatatcaccatccagaaataaatagtgaaagcacctttagacttctatctatacatatgtatcattccatttatataataataataataatgctatttggtaaccttatcttctccctaaataagataatcttaaatttattcaagtcattgggtatcattctacattatttttaatggctacttactataggtagagcattcttaatccaaaaatccaaaattcaaaatgcttcaaaatcagaaactttttgagtgccaacatgataatcaaaagaaatgctcattggagcatatcagatttcagatttttggattaagaatactgaactgctaagtaaataatgctaatattccaaaatccccccccaaaaaaaccctgaaatccaaaacaattctggttccaaatgtttgtataagggatactcaacctatattcttaagtatagctatagaataatttatttagcagtcttctattgttggatatttagttaggatttgtttgctattaaaattaatatttctatggttatttttatgtacatctttacttccttaagataaattcctagaagtagaattgttacatttttactttttatttatttatttatttttgagatggagccttgctctgtcacccaggctggagtgcagtggcgtgatctcagctcactgcaacctccacctcccaggttcaagcaattctcctgcctcagcctcccaaggagttgggattacaggcgcccaccaccgcacctggctaatttttgtatttttagtgagacagggtttcaccatcttggccagactggtctcaaactcctgacctcgtgatccaccacctcagcctcccaaagtgctgggattacaggcgtgagccaccatgtctggcctacattttcaagtatactttttgatgttgttggctagactaactttagaaaaaaaaaatcttacctcttcaggaaacatttattttgctaggtgctggggatgcaaaagtaaataagactcaaatagggtgaagggggttaggaggaaagccaactttcctctccaaggtagatgggcctgcctggatgtagtagtagagtccaaatgaggccgctgaaaggaaatccctcaaggagtgggaggtgaaaaagcagattctgaaaagaaagatacttccttttaaaaggaaatatctgaaggacttctccactaactgtaattttctgtgtcgactgtagcaaatctacaagcgtttataacaaatacaggtaaagtgcacacacagaacctacagtagaccactccatatctgagcttatttaggccagtagtccattccccaaaagtagctttaaaataaaaagctcattagttcattttgttccataattattttgagtacgtctgaagtcatataaaattaaatttcttaagagatttataatctagaaaagagaataagataggcttcctaattattctaatagaagataaatgctatggaaaagttcattctaaaaaaggagaataatatagtttcattggtgaataacaactttacatataatattaatatgtaagggagaaaaaatgccttcttttcctcaggttcacttgctggagcctctgcaaaataacaaaaacaaagaaaaacaaaaacccagattaacaagagaaaagcatataaatttatttaatgcaagttttatgtggcacgggaggcttcacgtggaaataagaccccaagtagttaaacctgaatgtttttatgtctggtttgatgaggaatggaatgtcatgaagaaaaatgataggacaaaggagtaggagctaagtgtgattaaccaggggaatagcaggacctgtttgttcagattcctctgtgtccctttgtcttctgaaatgagggtgcttctttactacaggtatagggagggtaactcctaagtgaaaatcttatgatctgcttcaggggaaagccaaaaagtccttcgtgcacatgctgttcctcagattccttcagtatgccagggtacgaaattttggggttgtgtgtcctaaactccatcaagtataaaataaatgcaaggcttcgggtctgatttttgagcttcatttgattccaaaatgcaactttaaaagcaattaggaggccaggcatggtggctcatgcctgtaatcccagcactttgggaggccgaggcgtgtggatcatttgaggtcaggagttcaagaccagcctggccaacatggcaaaaccctgtctctactaaaaatacaaaaattagctgggtggtagtggctcttgcttgtaatcccagctacttgggagactgagggaggagaattgcttgaacctgggaggtggaggttgcagtgagccaagatcatgccactgcactccagcctgggtgacagagtgagaccctgtataaaaaataaaaataaaaagagcaattaggaatcttaacattaacttcattataccctttttgtttataatcctgaaccatcttttcagttattcttatataaaatttacattaaaagtatcactgggccaggcacagtggctaatgcctataacccaaatgctctgggagactgaggcaggatgatcgcttgaggccaggagtttgagaccagcctgagcaacatggtaagaacctgtctctacaaaaaatttaaaaattagctgggcatggtggcacactcctgtaatcttagctactcaaaaggctgaggcagtaggatcacttgaacccaggagttcaagtctgcagtgagccatgatcgtgccactgcattccagcctggttgacagagcaagaccctgtctcaattttttttttaaaaaaaagtatctgaagactgaaatacacatggtaattctcatctgactggaattttttttcactaattctttgggactttagtaacttttagaaggataaagtttatgccatcgttaagaatttaataaaacttatttaatggggcaaaacaaagtatggcgattaagtgcagagactctgaattaaggattgagttcagatcctcactctgtgactctgccacttgttgtgtgaccttagggcaaatatcttgacctctctgtaccaaaatgtacaaacttgtcaaatgtgaataataaaaccaacctcataaatgaggaaggaaattcatgtaggataatgtctgctaacacaattaagcacaaataaatgttaactttttaaaaaggcatgtagagatgcctgttgcccttaatgaccgttcactaatacatggggttcacttagaaatgaataccacagaatgttgaaaagcactattttaaaataaattttaaaacagttctagctacaggagtgtatcaatccttatttgattttttgagtacattaagtagccattgcaattggcctttcttagataagtgtttataaaaagtattcacaacaagagcaacaattgacaagtgggatctaacttaagagcttctgcacaggaaaaaaaactatcaatagagtaaacagacaacctacagaatgggagaaaatatttgcaaactgtacatctgacaaaggtgtaatatccagcatctataaggaacttaaacaaatgtataagaaaaaaacaacctcattaaaaagtgtgcaaaggacataaacagacacatttcaaaacaagacatacgtgtgaccaacaaacatatgaaaaaaagctcaatatcactgatcaatagaaaaatgcaaatcaaaaccacagtgagatgccgtctcccaccagtcagaatggttattactaaaaagtcaaaaataacagatgctggcgaggttctggagaaaagggaacacttgtacactgttggagggaatgtaaattagttcaaccactgtggaaggcagtgtggtgattcctcagagagctagaaacagaactactattctacccagcaatccctttactaggtatatacccaaaagaatgtaaatcattctaccgtaaagacacatgtacatgaatgttcactgcagcactagtcacaatagcaaagacatggaatcaacctaaatggctatcaatgacagattggataaagaaaatgtggtatatatacaccatggaatactttgcagccataaaaaagaacaagatcatgtcctttgttggaacgtgtatggagctggaggccattacccttagcaaactaatgcaggaacagaaaaccaaataccacatgttctcacttgtaagtggaagctaaatgagaactcatggacacaaagaggggaacaacgacactggtgcctattttagggtgagggataggaggagggagaggatcagaaaaaataactactgggtactaggcttagtacctgggtgatgaaatcatctgtacaacaaacccctgtgactcaagtttacccaaataacaaacctgcacatgtactgctgaacctaaaggtttttttaaaaaaaggatttgatcactggtgctgggagttgtggtgaggagaatggagttgaagatgacctaacttctgaaatatctttggaattttattttggcatttatagaaatgttatgtctagatatgtaatgaaagccactatgactgattaaatatacgaaaagctaagccatcaagtggatatgtacaaaatatggctgatctgtactcaattactgaccgccagctttagaaataagtaaatgtgcattgctctccatctgactctacgggataatgacactaagaaaaaatatgcttcttagtgcagtaattttattagtacaataataccctttacatttaagagctttgaattttcattgctgctcttttggttttatccccaatattgattagaacctaaataattatctcttcaactatctaccagcattgtattttaacttcatttttgccttttcctatatattgctttggataagcaacttcttcaataatttagtatcaggtcatatatgatattctcagatcttaaattaaaagctaattttataaacataactaattataaccatcagtcaagatacgttgtttttgttcacctattcagaaacattgatacttctgatctcagtgagaccatgagtgattgttaacctgaacaaaagcattttttccataacctagaatataaaacaaagtgttgtttttccctttggtattattgtcaagtctttctttttactacatatgtcttgttcctttactctttcactctgcagacatattttggaatggatgtctctgcagttgaagatccagttcagagacgagcgctagaaaccatgataaaaacctacgggcagactccccgtcagctgttccacatggcccatgtgagcagacctggagccaagctcaatattgaaggagagcttccagctgctgtggggttgctagtgcagtttgctttcagggagacccgagaacaggtcaaagaaatcacctatccggtatgtcatttggatttcaatcgagtgcagcaaaacctgattagactcttgtgatgccaggcactctcccaggtgatgaatagcatggtcctggcctaaagctgtgtgccagtcagtgcaagacaggtgcagcagcgaaagcagaatcctgtgcgaggtaaatgctgtgttagcgatatgagagagtgctttggggagctcagaggaaaaaagaattcatcgtttcagacggtaacctccctcagggagcagagagaattgttattcccagggaaagcctcgcagggcagtgacataataggatttttcaagcaagaagagaaggactagagaatagtttgagcattggtgtgccagtgtacacatgcataccatggtcttggttatcatctacaatcaaaaggattgaccagtgatgcggatgttttggtttatacctaaggggaactttacatatttctttggcctcctcaggttgtaatgataagaagtattgcctccaaaaataggaagtaggtataatttttacttcaaaatagaaaaatcaagcaagccttaaagctaaagtggattttaatcttcaactcaattcttcgttataaaaacagcataagatagtagaatgtgaattgtaagcactgtaagggtttgcagaaggaaatcacagaaaatgaaaaggtaagggaaagacgttgtaaaggaccttaaagatgaaataactcagtgtatctcaaagtgcagtaatctgtgacctattttaagaggaaaaggtttttacacacctacaccttgttttgactattattccttgtaatattactttatgtaagacagaacactggatataaattatttgcgctcatagctcacatatgtcaaatgttcatgttaaatacaaacaaaacttattccaccagtgaaattcaattttaaagcattaatatggtagacagtgttgttttgctaaaactaaattacaagtgttgagtttcataatagaaaactatattttttgttttctgtttttgaagcttcacaaatcactttagtcactgtaattaccagggtcactatttttaactacaatctgtcacttgattgattgattgattgattgattgagatgagtctcgctctgtcgcccaggctggagtgcagtggcacaatctcggctcactgcaacctctgcctcccgggttcaaacagttctcctgcctcagcctcccgagtagctgggattacaggcgcccgccaccacacccagctaatttttgtatttttaatagagacggggtttcaccatattggccgggctggtctcgaactcctggcctcatgatctgcccgcctcggcctcccaaagtgctgggattacagatgcgagccaccacacccagcccaatctgtcactttaacatgtcagcataattttacaatacatccctgaaaattaataaatgccatttaatttactactatacttactgctcgttagctgttaaagttgtatctgagcagtatgtctgctcgcagtgggaacatggtaccagcctgcttcattcccacctcagaacctttgtgatgactctttgctccacctggaataaccactccccagatatatccccagtttgctccctcatctcattcaagtctctgctcagacatctcttcctcagagtcttccctgacccccatttaaatgctttccaaaagctctgattatatctaagtctaattatgtctaaaacagctgttccgtcatcctcagatcccttccccttctttgttttggtgtatagcacttctatcacctgacatattgtatatgtatttgtttatttatttgtctatactcccatcccaaatagaatgtaactccataaacacaaggactttgtctgtcttgttcattactgtgtccccagttcctaggaaggtcctgggcatataatagacactcagcattttttaaattaatgtcttctctgatgcaaattctttaaggtttggtttgctgcatttctgtgtgatgtgtaatgacatttatgccactgcttttctttatttgaaccacggtgaaactttcgacaccatactgcttcttgactctgtgggccttcacttgacatctacacaaaatgcaaacacaagccttgaaaccaagcaacagtactcatttataagggggtcatctggatgacccaggtatgcttgtgtgaacttcagttcactattgaagttcaaaacaatcagagctgtataaaaagcatttcaataaagcactcctctttaaatattctatgagaagtggctgttcatatcctttgcccactttttcatgaggtcgtttgtttttttcttgtaaatttgtaccagttccttgtagattctggatattagacctttgtcagatgggtagattgcaaaaattttctcccattctataggttgcttgttcactctgatggtagtctcttttgacgtgcagaagctctttaattagatcccagttgtcaattttggctcttattgcaattgcttttggccttttcgtcatgaaatctttgcccgtgcctatgtcctgaatggtattgcctagattttcttctaaggtttttatggttttgggttttacatttgtctttaattcatcttgagttaatttttgtataaggtgtaaggaaggggtccagtttcagttttctgcatatggctagccagttttcccagcaccacttattaaatagggaatcctttccccattgcttgttcttatcaggtttgttgaagatcagatggttgtagatgtgtggtgttatttcttaagtctctgttctattccattggtctatatgtctgtgttggtaccagtatcatactgttttggttactgttggaaaaaagctcaggatcactgatcattagagaaatgcaaatcaaaaccacaaggagataccatctcacaccaatcagaatggcgattattaaaaagtcaaggaacaatggatgctggtgaggctgtggagaaataggaacgcttttacaccgttagtgggaatgtaaattagttcaacccttgtggaagacagtgtggcaattcctcaaggatctagaaccagaagtaccatttgactcagcaatcccattactgggtatatactcaaaggaatataaatcattctactctaaagacacatgcactcgtatgtttattgcagcactatttactatagcaaagacatggaaccaacacaaatgcccatcaatgatagactagataaagaaaatatataccatgaaatactatgcagccgtaaaaaataatgagatcatgtcatttgcagggacatggatgaagctggaagccctcatcctcagcaaactaacacaagaacagaaaaccagacaccgcttgttctcactcataagtgggagttgaacaatgagaacacatggacacagggaggggaaaaacacaccctggggccacgcggtggagttggtggggatgggagagagagcatcaagacaaaacctagatgatgggttgataggtgcagcaaaccaccatggcacacgtatacctatgtaacaaacctgcacgttctgcacatgtatcccagaactaaagtaaaaaaaagaaaggagaataatgatcataaatatgctatgatataaaacagttgcccttgtatctttctgtgtcattgaaaaactagaagtttaaactctgcaactcatataaaaggaagttccttttatatgaattcctggcaaggaattgtgaatgataaattataactaaaatttagcacacacatttttctcaactttatttgttgattttttttgtttttgtttttgtttttttgagacagagtcttgctttgttgcccagactgaagtgcagtggcgtgatctcggcttactgcaagctctgcctcccaggttcatgccattctcctgcctcagcctcccgagcagctgggactgcaggcacccgccaccacgcccagttaaatttttttgtatttttagtagagacagggtttcaccatgttaaccaggatggtcttgatctcctgacttcatgatccgcccgcctcggcctcccaaagtgctgggattacaggcttgagccaccgcgcccgtcctttctcaactttaatattgatagatttggatcccacaggggagccacaaaaaaacactgttagacaaaattttagaagcttgttttcaaaatgcctgaccctaacgtctctgttcccacatgagcattcctgaagctcttaagcttttccagagatactcattttttagaccactatgatatcatttaacatgtcccctaaatagtctgacagaattattagagctcctaaagtggcacgatttttttaaaagatagtctatacgtcagtgatgccttttttttcatttatttggaaaatgacataagcaagtttcactaaaaatcaggttttttacagaaatgactgaaaattgcttaatatattatttttattttatgtagcatttcctctgaagagttgaaagtaaaataatgggttaaactcttaaatgtataaaaggagggaatccattaaaaaagaagagttcagtagaggataaaacagtcataaggagaacaaaaagaatagaactatttggggaaactctttaaaagggcatcatgtcttttcttcttcattttgaaactttttaataactgtttttgcttgaagtggaggaaaccttttcattaccgttcgtgggcagccaaatgggtatctctctagagtcttcactcacctttcttcccccaaatcctattgttcttcaagctctaccttttatttttcactgacaattctttctcatctcttttcttctctagtactggctagagattctctaatcctcgcaatatgttccatagataaacactttccctttcactcatcacgtatctatttgagatgagaacctgctatgttccaggcacatagatgaatcagaggtgttccctctcttcaaggagctcatagctgagtgaggtttcctgtgctacatgtggtcttgatttctattaccatatgtacatatggcttgtcatactaccaaattacagtcctccagtaagtatcaactttagtttaggtatttcaactagaaataagaaatgtactaaatttttttctctgctcaaatttcaaggaattttgaattattaaccacatattttcatgcaaattaggccagaaccacagagtaaaactcaaataagggacaaatatttctatacgctaagcatggggaagtaaaaaaaaatgcgtaaaataattattgcccttacagagcttataatccatattactttctcttactttgtttagagcttaaattagaagtaattctacacttaccaccttttaaaaagccatactttttatttttcttcattttagagtcctttgtcatggataaaaggcttgaaatggggggaatacgtgggttcccccagtgctccagtacctgtggtctgcttcagccagccccacggagaaagatttggctctctccaggctctgcccaccagagcaatctgtggtttgtcacggaatttctgtcttctgatgacatatagcaaggaacaaggtaaaataaaatgtaacgaagatcattctggatatatctttcgtgagatttgagtatttctagctcatctgtgctgctactttgagtccttggtggaaaaactcagctcaaatttgtggttatttagtgcaaagtaggaatgaaaacatgctacatgaaaaaacagagagttaaatgcagtgctatttgaaatgagaggaggaacttgaaggggacaagaatagatggttatgttcacaaaatgaagatgttatcgatttggcagaaatgtacactttgaggctgttgagccccagaatagacagacgtatttgaccaacaaatctaccatctcagaagatatagtcatgggtttaagcaacaaacacaacaaggatgtcgagatagccttgaaaataggttttaaagacacgtattcctgaaaaccaatccttttctgactccccacatactgactcactaaaagcaacatgtgggaaagtgctgtgcagtagaggcctcttcatgtttctaaatgtcaactagacactggaaaactagggacattttgcatttgagcagtccctcagccattccaaattagccatttcactagaaacaaaagaactcttcctacttactgtggacatggggcaccaaaatgaatgacctagggcactcatctgtttctatcaggttaaatgcagacttgcctaaaagccagtgtgtggactagatgcctgttagcagccagcactgctggcaattaccattaccttctgtgcactgtgctctttgggagccatatatagccttccacccaacctgcaatacaaaggtgccagcacccagagaaaacatcagtcacttaaagaaattaggtatgctagctgggccatagttcttttaggctcactcttatttctgtcatgaaatgaatgattgttttatagttgttagaaataagagaggatgcataccgttttatctatgtttagtgagttaataggatagggtagaactgtttaatcataattattgtgttatcaatggttcattcttactagtatgttacaattagttatgaggcaatttacaagtaatttactaataataccaaagtaccaacatgtgtgaattatttacctttaaaaaattagagtacagtaggctgggtgcggtggctcaagcctgtaatcccagcactttggaaagctgaggcgggcagatcacgaagtcaggagatcgagaccatcctggttaacacggtgaaaccccgtctctactaaaaatacaaaaaaaaattagccgggcgtggtggcgggctcctgtagtcccagctactcgggaggctgaggcaggagaatggcgtgaacccatgaggcggagcttgcagtgagccaagatcgcaccattgcactccagcctgggagacagagcaagactccgtctcaaaaaaaaaaaaaaaaaaaaattagagtactgtaaagtttctctctgttgagcaaaagagaaagagcaggtattatcactttgcattatgggacttaagcatgtcaaacatattctaagcctatcttatttgtgccactacagtcatgaacccttagtgtgcccttaatagctatgttcgctcaaattacacttaatttcttcgcacaatgtatttggaatttgtcagaacctgggtatgtccagagcagtagtttaatagaacagtttcctccatggcctccacaggcagttcctgagttttgcatccttgccctgctgcttactagctatgtggccttggggaagttaacttcgtgctttgcaaatcctggcttttgatctataaagtaggaataacaaaataatttacctcacagggtaattttctgtaaggattcaatacaataatgtatggggatgattagcacagtgcctggttcattctaagtgcttaataaatgcttattggcctgtaaataccctagggtctgggagaggtcagtgtttactacatacactcaacactagacccagcaaggaacagtccacatagacattctagagaggcattgactgaacaatgttgtagcttacagatgaaagttaggtcacttgttaacacaagagacacactgcatcagaatctctggggcttgagtccaagcttatacatgctgaaaatcaattttagattcaattttaatagatcctatttaagatatactgtcctaatagttaaaggagaagtttctttttctgaaagaaaaaaaaaaagatgatgcctcttgtggtactggaatgagaaaccttggtttatggagcacttgctgcatgccaggcatcatggcagattttgagaggactcaagactcatgatatgtggttcctttccctagcagcttatatttagaggagtttctatttagtgagtatattccaattcttttgttacaaaatgttgtcaacatttcttattttactcagcaaaacaaaaagctgtgaattgcctattttcactatgctgttgattcattcaagaaatatttatttgttatactcatctacttctgggtattctgctaggtactggaataaataaagcacattgtctctcctttaggaacttaaaacattgcaagtttcaagggcagtaccatttacagcatatatgctgcatttagctatattcagcataccaacaaagcatagataattaatagtactgggaaatgatgtcaaaatttccaaatttttatgccaagagaacatcatactatgttgtaaaaaagagagagggctgggcacagtggctcaagcctgtaatcccagcactttgggaggccgaggcgggcagatcacttgaggtcaggagttcgagaccagcctggccaacatgatgaaaccccgtctctactaaaaatacaaaaaaaaaatcagccgggcatggtggcgagcgcctgtagtcccagctgctggggaggctgaggcacgagaatcacctgaacccaggaagcggaggttgcagtgagccgagattgcgccacggcacttcagcctgggtgacagagcgagactctgtctcaaaaaaaaaaaaaaaagaagaagaagagaagaacagagcctccttgaattgaatgaaggtctaccatacacagtcctgcagttgacaggattaaatgatcccttctcaggctaggtgttgcttccactctagcagtgttatcttcctgctactaacagttgtctatcctgggtatctagaaagttaaatagtatctagttcatatttatttttaaaagaaaaggtgtctcagaacatgaatagagtaagcttcactattactgtcttttataataatttcttaacagaaattttagttctgagtcaaacaaatcccagtcaaaacaacacaagtgaaaaaatataatcccaccctgagaaccctgttagcattaaaggaataaaactaaaaaattgttccattttagagatttaaagatggtcttgcaccaaatgatatgttctgctatgtaaacttcaccctttaatctgccagttttgggctgtcatgtaacagtcgagcagtgacaatctgatacttttctttctccttctccttgaggtgtgagaagcatgaacagtacggacattcagtggtcagccatcctgagctggggatatgctgataatattttaaggttgaagagtaaacaaagtgagcctccagtaaactttattcaaagttcacaacagtaccaggtaaacactttattttattttatttatttatttttaagacggagtctcactctgccgcccaagctggagcgcagtgacacatcttggctcactgcaagctccacctcccgggctcacgccattctcctgcctcagcctcccaagtagctgggactacaggcacctgccaccacgcccagctgactttttgtattcttttagtagagacgggatttcatcgtgttagcaaggatggtctcgatctcctgaccttgttatctgcccgccttggcctcccaaagtgctgggattacaggtgtgagccaccacacctggccaactttttttttaattttagagtgtcgctctgttgcccaggctggagtgcaaaagcacactctcagctaactgcaccctccacctcccagactcaagtgatcctcctccctcagcttcccaagtagctgggactacaggtgcgtgccaccatgcctggataatttttatattatctgtggagatagggtttctccatgttgcccaggctggcctcaaactcctggactcaaatgattcacccgccttggcctcccagagtgctgggattacagtgagccactgtgtctggcccatgtaaacgtttttgtggtatctttataatggttaatgcataaaaatgagtcagactggctgggcacagtggctcatgcctgtaatcccagcactttgggaggctgaggcgggcagatcgcctgaggtcaggagttcaagaccagcctggccaacacggggaaaacccatctctactaaaaatacaaaaaaaattagccaggcatggtggcacattcctgtaattccagctactcaggaggctgaggcaggagaatcgcttgaacccaggaggcagaggttgcagtgagccaagatcacgccattgcattccagcctgggtgacaagagcgagactccatcttaaaaaaaaaagagtcagactgatagcagctaggttggttggttggttggttggttggtttgttatgagatgaagtctcgctccatcgcccaggctggagtacagtggtgtgatctgtgcccactgcaacctccgcctcccggattcaagcaattctcctgcctcagcttccgaagtagctgggactacaggcatgtgccaccacacttggctaatttttgtatttttagtagggacggggtttcaccatgttagccaggttggtctcgaactcctgacctcaggtgattctcccgcctcagcctcccaaagtgctgggattacatgcgtgagccactgtgcccagccaagcagccagtttttaatatcctgcaatttgtccagtcaagaatctgatgttaggctgggcatggtggctcacgcctgtaatcctagcactttgggaggccaaggtgcggggatcacctgaggtcaggagttcgagaccagcctggccaacatggtgaaaccctgcctctatgaaaaatgcaaaaattagccacgcatggtggtgggcacctgtaaatcccagctactcgggaggctgaggcaggagaatcacttgaacctgggaggcagaggttgcagtgagctgagatcgtgccattgcgctccagcatcagcaaccagagcaaaactccatctcaaaaaaaaaaaaaagagagaatctgatgtttatagtacttacagacttcctaactaccactatttgtgtcccccaaatttgttttctacccattttctcattgagagaatattatcaaaatctcctgctcaacatcagtgaagggcatagtgtttgaaccaaatcagcattgccttcttctcagtgttcactcacctttgtcattaggtcattttctgtaaccatagtgccatcttttatacctgatttttcctaaatggactggttattcagacatcatgtatagtagaaagaacattgggcctaaagccctgtgatctttgttagtgtcccagcttcgttatatactaactgcagcctttgactagtaacttaatctctccaaacttgagtttctttcctcctcattacaaccaagataatagtactcacacttctttctcagaaagctgctgtaaaatgtttccagtgtttgtgaaagaaacttgtaaactgtagccaggcgcggtggctcaagcctgttatcccagcgctttgggaggccgaggcgggcggatcacaaggtcaggagatcgagaccatcctggctaacacagtgaaaccccgtctctactaaaaatacaaaaaaaattagctgggcgtggtggcgggcgcctgtagtcccagctactcgggaggctgaggcaggagaatggcgtgaacccgggaggcggagcttgcagtgagccaagattgcaccactgcactccagcctgggcaacagaacgagactctgtctcaagggaaaaaaaaaaaaaagaaacttgtaaactgtaaaataccatgtaaatatacagtatgctgctgcaaccgttccagactgtaaatcgtatggacagccttcttttttgactctctttccatgggaagttctcttaccattcatcctctgatttccattacctgcataacacctgctgccttatcatgtgtcctaaaatgtatcccattccctgagctctttagaaatggaggaagctacttaggggaatgtttagcagtgaaagcaagaggagcagtgccttgtttgcataaccctcaatatccctgaccaaaatattgccaccatttgttatatagcttaccaggaaactgacagaagtaagaataaagagacagtgaaaaacaactttactaggaactttaataagattttttttttagttttgaaacatcaggctgcattaaccagagcctttgtatgcagatagaaatatatatatccaaacacaaacaagttataaccataaatcatggcaaagcttgtagtataactaaattggaaatgagtctacaaaataaatgaaaacacaaaaacatattatagaatcagtatgtcccttactgcaccctttttgggattattataaattgggaaaaacagacaaatatgtacagtgggagttagatatacaatacattctacctgtcaaaatacactgacacaaatttatgagcagatttaactcattgctgtcatcagtaatctgtatttacaaacatcttgactttccaatgaaaagtgaagaaaaatgaaatcatcatcagtattaattgaatgttttcaacgcaatgttaaagatataacataagctttcaatcaaattctttacacctttaattactaggcattccttctatttaagagttgggtactgttacattagattgatgtggtgtgaagagaggacaaagatgaacaaataactttaaagatgctttccgattcactaatttattttcaccagtacaaagacaagcatttagtcaaattgtttttgccaagtaaattgacttgttagtttagcagatccaaagcttgaataaagttgtttaaaattcttatttttatttttttctagctttattgggataaaattgacaaataaaattgtatatatttaaggtatacaatgtgatgttttaatacatgtatatatacattgtgaaatgattactacagtcaggctaattaacacattcgtcacctcacatagttagcattttttacgtgtgtgatgagaatatttaagatctactatcttagcaaatttcaagaatacaacacagtattattaacagtagtcaccatcctctacgttagatctccagaacgtaatcatcctgcacaactgaaacctgtaccctttgaccaccatctctccattccacacacattaccagcactctcagcccctggctactgctactctactctctgtagttcagctttttttagattccacataggagcaggatcatacagtatttgtctttctgtgcctggcagattttacttaatacagtgtcccccagggtcatttgtgttatcacaaataacaggatttccatctttttaaaggctgaataatatttcatgtatataaaagaatttaaacattgcaaaattatttgtatcataatagatgaaaataaagatgaaagaacactatcacaagtcctgttagcaaaacaagatgtgatgacattgtgtgatactttgagtcaaatgactaaactggatgagaatactatattgcattttcatctagagatacatttctaaagatatatttttgttcacccattaattctttgatttgagaaaattcagctaggatattattgttgttgttgttgttgttgttattattattattattattattattattattattattattatttgagacggagtctcactctgttgccaggctggagtgcagtggtgcgatctcggctcactgcaacctccccctcctgggttcaagcgattctcctgcctcaccgtccctagtacctgggactacaggtgcgtgccaccacacccagctaatttttttgtatgtttagtagagacggggtttcaccatgttagccaggatggtctcgatctcctgacctcatgatccgcccgcctcggcctcccaaagtgctgggttacaggcatgagccactgtgcccagccaggattttgttatataaagactcacgctctgagatttcacttatatgatcaatttcatcatcatcagtagagtctagagtcctgacggctgtgtgccttcatgttgtgattagtctcataattgtgaaacatcttcctctgtcagctttcttggtagaaaatgaaaaattctgaattctccaccgtgttcaatgaaagccaaaagtagactacagaagtggtgtctccagccttcttttatactttcctgaaagatgacactatactttggacaatgcaataagaaaaccaaaagatgacgatttagttcacatattagattatcctcttgggagattccatcattctcccatttccttgcttgtttgtttgttttttgcgtatttaggaataattgatgagtagtgatgaaataatttttagaatgatgaaatcgctaaatgtttcaggatatagaaaaacaagttagttattaagatcttgtaatgtaacttaggttgattcactggatccatgtggtaattccaagacagaatgagttttattctgtgtattttttaaaagtgcattttctctttgttctttggaagacctccaagaaagaataaaatttatgaagtatcaatcctaacaaatagaactactcaagaaagaaactgaaaacataaaattggatccaatggatccttatggtataacgggagttaagaagaataaagatcagagaaagtcattttctaaggtagcagagacgtgaacacacttgtagtgcaaggggggaagccagcaagagacagcttgaaactgtaagaaaaagaaaacaaggtttctgaggaagcctgaggatgaggcaaggctgaccttgaaagcagacatttctttctctgaatcagaagacagggaaacatgttgaggtgcagaggagaggagaggaagaggtgtgcagctgggggtctccatctgcttagtgaagtgagtgtgggggaggtgggacaggagagcagttggggacagttgctgcggacatggtgctcagggtgggggtcagctagcatggaaaagaggacctgtcaggccacatagaaaattgactcaaacctgagtggtgcctccatggttaggactgagggattttgtaccaaaggcataatcccatcttttacattcacatttatcttctttcttcccctgcttaacaatctttagaactattagaagcaatacctctgtttacatgtacctgtttccccaccaaagacataaaacgaggaaaataaaagcaaaaagcaaataaatatgtgaagtacacatacattcacactcaaccttggatttaatcaatcctgaatcattttgttaaatttatctaaatatatatacacatatatccacacacaggcacgtatagacatagactatgcattataatatattttaatttggaaacaacatttagacatttggctcaaagttacggaatattactatatctgacacgtttctgtttcaagaaatgtttacctaacatttttgagagttaaaaaaaatagttgtcagaaaagtagaagtatttttcattcttttattttatttttattatactttaagtttcattcttttaaaacatgataatctttgattggtcctttttcaaaggtgactagttgtgcttgggtgcctgacagttgccagctgtttactggaagcaaatgcggtgtcatcacagcctacacaaacagatttacaagcagcacggtaggttctgggcttctgtgtgggtagtatgggactttgtcaatgaggggaagaaagcctttatgaagtataattcactttgcataagattaacttaaaatgtttataccttaatcttctccctacattaggtcttaaaatgctttagggtttattagaatcatgaaaaatcttgaaaacaattgtagtagtcccattttttttcagagacggtattttgagttagatctgttttgtatttaggcttttaaatgacattttggtgcttacctgtatttgcgatagcaacctgaatccttaggagtatactgtaagagtctatcagtttgaaagcttagaaaccctaatgtccaacattccgataacctctgggtaaactaagtgacagcaaaatctaagtagtctgtctggatttgtaccacttactggaagaaattttattatttttcagccattcactgaactcccaggattttggagttgaatcataaaacgggaaaaaataagacagattatgcaatgcttcttttaatttactgtttttggggggttttgttttgttttgttttgtttttgttttttgagacagaacctccctctcttgcctaagctggaatgcaatggcacaatctcagctcactgcaacctctgcctcccgggctcaatcaattctcgtgcctcagcctctcgagtagctgggaccacaggcatgtgccaccacgcccggccaagttttgtagttttagtagagatggggttttgccatgttggccaggctggtctcgaactcctggcttcaagtgatcctcccacctcggcctcccaaagtgctgggattataggtgtgagccatcacgcccggcctgtttttgtttcttgaatcaactgcctgtggtgcagttgaggatatgtgtcaagtttaggttgataactcagtaatcatcattctgatacagaattttcactgtgcatttttttccattataattttctttatagtattaaatctgttttactgagtgaaacctgtatttctagcatagggtgactcccaggttcttcgttttctttttttgtttgtttttttttttttgttttgttttaagacagagtctcactctgtcgcccaggccagagtgcaatggtgtgatcttggctcaatgcaatctctgcctcccgggttcaagcaattcttctgcctcagcctcctgagtagttgggattacaggcgcacaccaccacacccggctaatttttgtatttttagtagagacagggtttcgccatgttggtcagactggtctcgagctcctgagctcaggtgatccacccgcctcggcctccaaagtgctgggattacaagtgtgagccactgtgcccagccaggttcttacttttttttccaagcttattcccttttgaactcttgttaagtttctttgcatggtcactgaggtataaatgtgaccatattttgtttctgtctcttagtctaaggagccattaaaatggtataaacaggagttatatgatccagtcagcattttagggagaccactgtagagcctgcaaggagaaacacttccaagggcatgagactgggagccaggacaccaacgagaaggccaccgcagtgatccaggcaggaagcaaagaagggcaggttaaggagccagaacagtggagtgtatgctctaagacaggcccacacccaggatagaggaccacagaagaaggacatccagacatcagggagcctgttaagttacacttgagctggatcctaagggatcaatctactgtaagtaaaggaaagaggaaagaacatttcaggcagaggaaatagtttacacaagagcctggaatcaaaggcatggggattttggggggtggcaaatactttcctgtgtagtttagagtgtaacgtgttggggaagaatgacaaaagcagggcaggaaaagattgaggccagtgatgaggttcttatatgccatgataaaaagaatgctaaagaatataagcagggtgtggtggctcatgcctgtggccccagcactttgggaggccaagacaagaagatcgcttgagcccagaaatttgagaccagcctgggcaacatagcaagaccttatttctaccaaaaaaaaacaaaaataaaaaaattggtcaggcatggtggtgcatgcctgtggtcccagctacaagggagactgaggtgggagtatcacttgagcccagaaggtcgagatcacagcagtaagccgtgaccacaccactgcactccagcctgggcggcagagtgagacctgactgaaattgtttttaaaaaaggttataagcagagaatataagtgtcataactttttgaatgtctcctttttatcaccttttgattcccaaaggcttaaaatgaatgttaattttataacatctgtaatattcacactgccattacctttaatcttctgagctcccctttctgacttcccctacaaatcgattctaaaccctgctgctagggcagttgtcagcttgtgcacttggatcattttgcaccatgacatggacaccttttttaaaacctggctttatcttttgctttttatttccttttgcttttgccaacactttgaacagccttgttcttagttttccctacttctccatttttaattgtgcactaacacagtgtgcagtacaggtttaaaaaaaaaaggttaagctgtcactataggagtatttgtgcacaggatagctttgaggaagcagatcaagagcatagctattacaatttaaatactgcaagacatacatttcttttagttttgaggtcatgacacacttgtgaaggcttatgttgcttagctgtcctcagttatatatttgccttaaagcagatttttcagctaatttttataggattttttttccacctaagtattaggtaatcaaatcatgagattaatagttactatttaacagtgccaaaaaatctaacttagtagtgtagttttatcagtttgttttgttgggagattacttgggtatttgtagacattgttgttgctttttcccagggatcgtgttgctattctggcatctctaaggttgtggttctgaccctgagcttgtgaggttagcaggagacacctcatgttcactggtttctgttcttcagctttcctgacccactgaatgcatggttttaaaagtgttcatgttctcctttggattgtctttaacacagacaaaagatgggccccccaaccaagtgccacataggatgtggccaaatccttgtttgaaaatactttcaaggggatcttaggaaatgccttccttagctagtaagcatatctaactttgagcaccgtaagtttctgttgaagcacccaagataaaagtcttctaaaatgcattctaggtaatgatgaataagttgactcgttatatgggattgtaacctataagccatttaaatgttagaggagaatatcttctaaatgtgataactgattttaaaatagttgctgtcgggttattctgtcacgaagtaagtaacgtgtccacatcatcttcgtataagtgaacacctatatatctgttatctaacttgagagtggcagaagaatatgtgtgcagcttatacaaggtagtattacttcattcaagaacaatatttaaaagaaggtgccagcacaagagacctgctcgacccgctggaagttattttctgacccatcagtgaattgtctagtaatattagcctttgcagttatttcaaagtgcagagtttattaaaaaattatcaaatactactattaggacccctatgttgtgtttacccataactgttactcatttcacagagtaaaaggtggagaataggtcaataaatctgtactctatgtttcttctgacatattttttacaataatgaatgggattgactgtggtcagtaggagaatgacctaaaactttaggaaaatattggcccaaggagaccaaacttgtaacttatcaagtagaacgctaacctcattttagttttgatgttgaagtaactcactaatctgtactcagtgaattggagatagttgttctgtttaaaattgggacactgaagaaaaacaaagcatgtgtggaaaaaaataaaatagaacttctagaaatgacataataaaaataatagttaatatttactgactgcttactttgtattaggcattgttctaagctctttacaatttctgatgtattggtttttgactcaagtatctttatttttctctatattctttcatccgactacatttctatggttttaactgttggccctaagcataaaacagatgtgaggatgatcttattctaagagctgtgcattgtgttccagccccaggttgtctgatactttcctttcttatctcccacctggctcatggcctctcctgcatcagtagtgcctgctgtgggcttcctgaggctgcacagcatgcttctcattgcttgtccgccacatgcttctctggggcttcctctccatgtccgccagcagcctgttgagctaaggcaccttccctttccttgttgctcttctctttctccactttcttcttgggcatacagggtcttgcccttttgcccatgctggagtacagtggcacaatcacggcttactgcagcctcaacctcccagactcaagtggtcctcccacctcagccccatccccgaccccctaccaatagctggggctacaggcacacaccacaatgccctactactttttaaatttttttctagagacgggctcccactatgttgctcaggctattctcgagctcctgggctcaacaatcctcctgcctcagcctcccaaagtgcttgcattacagacgtgagccacacgttaaatcttcgtaataaccctttgatgtaggttttgtcattatctccatttttacatgagactactgaaacacacagttaatccttcttgtaacttgcccaacgtgtcacagctgattcattggaacagctagtcaagcagcagattacagaattaatgaactgaaaaaaattacacagaatataaaatagaaagataaagaaaaaaaatgaggaaagaagggatatgagggctagaatgagagcatccaaatgtgatgagtagttacaggatgagagaaggaagaaaggcccagtgtgaagagatgatgactgagattttcctacaattaaaacctacattttggattaaagaatcacagcaattcttggcaggataaatagaaatgagtcaaacctgtctcctccagatgtccccctgaccattgccccagctcattcctttgcatcctgcctgggtccctatgttgaccttctcactggtgtcctggccaccagtctcatgtccctggaagttgagtctccttgtaggctctatgatggccttcctaaaatgccgactgcatcacattagtcctgccccagacacttcagtgaccctttattgcttcggggataaaatgtaggttgctaggcatcacacaccaggccccgtgctctgacccctctctgcctcactgccccctctacctcaccaccacgtttcttcctgctccctacctaccctgctcccagtaacattggcagtgccactttctttcatatctcctttccctcacacatgctgtcttcttagcccagagtgccctttgacagccatttttctttgagtaaattctgccagttcttcaaaacttcagttcatatgccgtcttccagggaatcctcctttcactccctgtccccagtctgaggaagcgacttatctgtgggtccccggagttctttgtgaaaatcatctttggtagccctcactccttactgccatggagctgccagaggggaactctgtatccccagctcctggttcagtgacaggcacacagtaggggacactcaacaatgtttgttggatgaataaatgtatgggttgccctccacattacctgtctctctctgtaatatgaaaatcacttgtaggccaggcgcggtggctcacgcctgtaatcccaacactttgggaggctgaggcaggcggatcacctgaggtcaggagttcgagaccagcctggccaacatggggaaacctcttctctactaaaaatacaaaaattagccgggcgtggtggcagctgcctgtaattccagctactcaggaagctgaggcaggagaatcacttgaacccaggaggtggaggttgcagtgggccaaggttgcgccattgcactccagcctgggcagcaagagcaagacttcatctcaaaaaaaaaaaaagaaaatcacttgtgtgtccttattagaaatatccatgggccagtcacagtggttcatgcctgtaatcccagcactttgggaggccttcccaggtgggacgaccacttgaagccaagagtttgagaccagcttgggcagcatagcaagaccctatctccacaaaaaaaaaaaaatttaaaaagtagttgggcatggtagtgcatacctatagtcctgttattcaggtggctgagatgggaggatcacttaagcccaggagtttgaggctacagtgagctataatcacaccactacactgcagcctgggtgacggagtgagaccctgtctcaaaaaacaaaaacaaataaacaaaactatgatcatggccgatggccaacaagagatttactgtttcttaaaaaagttgttcagaataatcctcccctgaaacgatgaagagtggataaaatatatatacaaaaatatatctttataaaatatatccatgttttaatataacttataagtatatattttaatataatgtaaacatataatgataaaatatatttttattcagtcttagttgtgtgtgtgtgtgtgtatacatagatatttatagagagagagagagagagccttaaaagcattgaagatctgacaagctagtaagaaactaccaagccagagaggtaaataagcaggaaggagctttagccctgaggacactatcaatcctgaaacactgacactgtccttggacagcctctgtggaagaaatggaaaacggcacccaggaactaagcaagctggggagtgccaagagagcccgcctccaaaaggctggtccctttcattctgctctctcagaatgaaaatgagttgcatgggagaaccctggaattccctggtttgtctaggatcctcaaagacttcactttgcgttaaggtggccccaggctggtgtggtagtgggtgtcatctggcagaaacaaggaagttacttgcattctgttccacaaatagaggaattcctacaagtaaatgttataatgtagtgacaaatacacaaaaccaggcacaaaaaaatacagctaagaaaataaatttatgaaaaagttaaaagttataataaaataaatatcatttaaagcaaccttgattgccacttgaaacttaggaaattttcaaagatttagagtggggccaaatcacaaactcaatgctgcagaacccaagcagaaaaggaaggggctcaggtcctttagagcagggaattccttggtcctacatacctcaaagcatgatctgaaatgggttatgggtatatcccagtggctctgcagactcctggctgtggagagtgtcacaatctgagagccagaatggctctaaagggagggcccagggatccaggcttactactcttgctgttgttaaaagctgatctggtcgctgtgattgttttcaggtgaaggtcacacgccctagctaaacaggcagttgctacacagctcaagccagttgttacaaggaataatgtgagcctggtattgcctggtcttttgattctttaagtgtaaaatatgtatttttatgtctataaaaatatgtaactggactacatagcagctaagatagatagctgtacctaatatatcaacacagatatatttcaaaaacaatggtgtttttgagaaaaggtaagatgcagaagatacctaaaaaataataccatatattcagaattcataaacatgaaatacaatataatacttatatgtattatacagtatgttgtttatggctatagtaacataatggaagtataaaaacttacataggagtataaatacaaaatttaggctagtagtaacttctgacaagacagaagaaataggatgtagaacagtacacaaattatatgtacaatgtttaatgctttatttaaaaaataaattgataatataaaatgttaagatttgtttaactgggtagtcagtatatagctctttattatacttattctttctacttttctatatttttgaaggggaaatattgaaatgctttatgataatagttaacctaacaaagcaagagtcaaaccctgtgtggacatctggtatccgtgagccagtgtggccctcagagcaccagtttgcaagctttgatttagaaagtcaagccataactgctgagtatcggtagcattagggcccattaccgttggtaacatcaccaatttgcatgacaccttctgaaagtacactgtcaagaactataaaattattaatattcacaaacccactaggaaaattttggaaattttagcagagacagggtttcaccatgttggccaggctggtctcgacctcctgacctcatgatctgcctgcctcggcctcccaaagtgctgggattacaggcatgagccaccatgcccagaattttttttttacagaagtatttcttcttaaaaaactttaattatttatttcccaaaggtctgccctctaatctactaaaaaccttttatacatgaagaatttatggtattatctataatttgaaaaaaatagaaacaattttaagtgtctatcaatgaaggatagttgtaaattgtggggtactaactgtatagaatattataacatcattaaaaattattttgaagacaatgtcaagattagaaaaagcttataggagaatatgtaaaatataaaataggaaatttttatgtggcaatattacaactataaaaatacatgtatatttgaacaaagattggacaagaatagacaaaaatgaaaaccagataactggaaattatgaggaattaaaaattttttaatttctttctttgttttactctgaataggattgaagaatgatatgtttgagaagaccatttgagtcactttggttgttttatttttgagatactatactagagtactttttgttgtggtttttatctcatacttaattttaaaatttcagccatcagaaatagaaatggagactcaaatacatctctatggtcacacagaagagataaccagcttatttgtttgcaaaccatacagtatactgataagtgtgagcagagacggaacctgcatcatatgggatttaaacaggtacagaagaaggtctccaaatcaaacatagcatttttaatatatccatttttactatatgaaatagataaaccaaaataatgtctttacgttataatcattttaaccatgaaacacatgcttaaaggtagtaagattacctattatattttattgaagtcatacaatcagataggaaaacatgtatgccttatgtacaataggtacatagactgagaagaagaattacaaaataagagaatgtaattatatttaatgatcatatacaaattcatgtcttttttctttcaggttatgctatgtacaaagtctggcgggacacaaaagccctgtcacagctgtctctgccagtgaaacctcaggtgatattgctactgtgtgtgattcaggtgagcttgctccaacccaaagcacagggctggctggtgctctaacagcgcattcggccagtggttactcctaggtcgagccattctctcaggtccctgccagatctaaatactttggtaacagcatgtatgtgtatagaaatacaatatggtccaagactgagtgcatcaatttaggcctcagcttatgcagaagttagtattgtcataatttaactattttcctgatacatgtaaaattgcatttgagtacatgttaagctaagcaaattattgttacatagttttttcagttttcttggttttgacttttctccccttttttgcttctgctttgtaactattgactttgttaccttcctcctgtgaaagaacaaaattttaacaaattgagctgaaaaattgaattagcttttattaatgattcatgaatcaggcagcattccatctatgaaacagaaaggtaccccagagagccgagcagaggaggtaggcttcataggcagaaaaagctgaagaaagcagaaacaaggaacaaaactcagatagatcattccacagttactttccttagaggattaaagcagaaggaacttccttatcataccagctcaacttgagtgatcccctgtcattgattgctgtgaatctcctgtttttttggaaaactagcccatttccaagttcagtttgattatgtgtcacctcgcacaagtgactactccattcttgtttgatctggtatgttagggcctagtgcaggagctcagtctaaaacattggcctcccgtaaattttatttaacactcctgactaaatgaaaagcctcagcagatgaccagcttgaatatatgtcttccaggttcagacagagagcaatagtatagaatagtaaatggaagtatagtttgccttaaaaattacatgacaaaaatatatcacctaatcaagagtgttttgttgttgttgtttcatatatacatgttaagaaaccaatgcatccagcagaaaagaacagttagaaaattcatgaattttctgtttgcatttctatttttaagggtcttaagatgcaaaggatcctctgaaaaactgtttgcttctttctgtccattcagtgttggacatacccatagtgggtagtcccctatcctttgctagcattttttacattgtttctttttttctaacacaaaatgtatggtgtttttccagagactaaccagttctctgacaccaactgggtgtcccaccatgcagttcaattgtgacactagaagtttgcaaatttggaggctgccatgagccccaccctcaggttcaataatttgctagaatgactcacagaactcagtaaaacactatttatacttaacaactatcatttattataaaggatagaaatgaacagcggctgaagaggcacaggaccaggtctggaagtgccctgagtgctggagtgtctgtcctcctggagtcagggttgtggagttagggtgcaccatgttctggcacacagttgttagaaacaagtgcttggtgccgtaaagaaaaactagcacttagaagatttctcaggaaggcacatttacttctgcagaaaggtgctgcctgcgtccgaccgaccgatcgtaagagcacaccgaaaaaaggagataaagatttttatccctaacacagctcctgttgctgtatcctctcgccattggctggagtcagactgcacaatctaactaactcaattggctaagacttaaagttttctaactatgataaacatgcagtttgcgagaggaggggaggaagagactgttgctaaggcaggaagggtagtttatagaacaagtctgggcatgtctaggcatatagaggtttgctagttacaaaataagcaagggtgggggctgtttacagagcaagaaagaccaagggagcttggaacttattatttctgacacttttcccccttttgatgttatacttcttcctcttcagagtccttaaatttttctaacatctcttggctttgtagttccttttggttgtttaagagtaggaacttatttgagtagggcgggggagaatcgagagaggttttggtaagagctttttctataagcctttgccttgatccacgaatacaaggtatgatgcagcaacttacaagaatgagtacactgataacaattgcaagggggataaagattgatgttatgagtcctttctattttctaaaccatttttctatgacttttcggctaatttatttgctagggtggtaaggccctgtagggcttttgtgattgttttactgggggctgtgttgttagggataaaagtacaacattggactccaatcatgacacagaccccgccctttttggccaatattatgttaagggctattctattttcctaagccatctgactggtaggacctaattgttcagctattcctttaatggcatccctagtatagttagcaaaccactgttgattataataaacgtaatttatccagtctacatttttgcttgcagttacccatgagaacaatatagattcaaatcctgcagctatttgattcctggctttaaattcatttagcacctcttgtggaactttgatagcatttatatatatgtgacgatcaaaagacccgagggggacacttttttttttttttttacgattgttctttctatttggttgatgaaatgccagggtgaaagggatggctaattggattagagcgcaaatgccactccacttgcttggcagagtacttaatagtggtccactacaatactaccatacatccgcttggggatgaaaacaagggcagacaggctggttaactcttgaaaaggcttagattcactgcgtcctgttaggcttccaaggaatgccaaatattccccctgtcgtgagagacacaaggtaaaattgacattgttacttggaggccaaatagctctggagggctgacccacagagcctgtaacttctgggaatagtaacgagagactggcatgccttattgccccgggctgtggggtcttggaagagagctgctatgcagttcatattctgtgggtcagaggaccatccaagtggaaaggggacgatttgggtctctgctctgcctgttgcaaaagcgcaacaatcgcttttatttaaggtgtgagcggaatatttaatccatttcagccaggcatttatatcttggtacccagttgttatggctaaagtttgttttaaatccttgacttttattataactactttggttttgtcattgggcatgaaatggtagatggtttgattggatgggcttggggaaggggtaacaatagaggatagcggggaagaaacaaagcgcatttcaaagaagcctgtagagtcctttctaacggcattttctcctagaccatagaagcacctaaggtggggttagagttgctagaggtagggatagtaatagagatgagtagtgggttgcactggtgggtgtgacagttgtggggggcggtgactccttcggtgaaatggaggtaaggctttagggtggtgcaatcatctgaggatgtctaaccttgatttttggtggtctaaacaacatatgcccattgagaacataaattggggagagagtgctgatctccccaccataggcgggataagggggcggtagtggcttccctggaggggcagaggtatttttctgatgctatttctctttggcgttgaaggttcctgcagggtataacaaaacaagcattaaaagtaatattttggggtgagcttgacttagttacattaataataaaatggagggggtggttaagggaaagagaagagaaaaaaaaagagacagactgattagacttttctttttaacattgctttggtgggagttggccctgggacagtggtccatggctttgaagagggcagtgctttcttgactcgggtataatgggtctaccctttttcagcagtttggattactgtttcagttgttaagagcaccaggtaagttccttcccagatgggctcgagctttccctctttgcaacttctgataaggatgtgatctccgggttggtgtcggtgaactgggagtttgaggggtggagtttgtgctaggaggctttgagtcttgagggagtgagtaaagggtggaagacagactaaatacatagtttctaagaaactgatcctttgtctcaaatgttgggaggtcagtagtggaatttaaataaggcaacctataaagcattttatacggggataagccgatatctttctagtgagcagttcagactcttaatagggtaacgggaaaacacttagtccatggtaatcgagtttctagaattaattttttttaattaagtttagaaaagtttctttagttataaaagtaatcaaatcccttttcacaatggaaagttctacatgatcttaagaactaaaatatcatgatttgaaaagcaatatggaaagttatttgcagtacaaactctatcacattcacttaaaaagcagccaaagttgcttttttctaggtatacaggcaacattccacaccattcaatactacctcccttttgtgaaacactttcttctggtggctttcagaatactagtctcctgatttttcttctaggtcactggtgggtccttctcagtcttttgctggttcctcctctttttgtctacttcttaacgatggcataccttaggtctcttgtcttttgctaccttctcttctctagctgtactaggtgatcttatccaaagtcatggttattccctaatgactcctaaatttatttttccagttccaaattataccctgaaatccagacttggatatctaattgcctacacagcattttcaacttaacacagccaaaacaaaacttgattctacattcctccaaacttgttccttctctggtatgcctcatctctgaatttcagaattcacccagttgacaggtcaaaaacctgagtcatcctttactcttctccttctttctccttatatccaagctattagcagacattatcttctctacttacaaaatagagtctgaatctaacttctaacttctcctaccctaacatctatcacactagtccaaaactgttacctagaacactataataacctaactggtctttgctttcctctttaatctttttcagtctaactttcacactgtagctctatatttcataaaggtaaatcgaattatgtcatcctcttcttaatctaattgcttcccatttacatatctacgccaggctataaggacctggctttcttccttatgtcacttcttactattcttctctcttaatcactatgctataacctcactgacctctttgttattccttaaacatgccaagtaagttacattttagggccttttcacttgcttttacctttgtccagaatgctttttccctaaatatttatatggctcatatgcttacctcactggggcctctgcatatgttatctcttcaaacaggcttctccaagccatcttatctaaagtattaaccctccccacattctgtcccagtgggattcatcctgggatgtaaagatgattcaacatatacaaatcagtaaatgtgatatatcatgttaacagaatgaagagcaaaagccatatgataatctcaaaagatacagaaaaaagcatttgacaaaattcaatgcattctatccctattccctgccttttatttatagcagttgatatatttgcttatattgttattatttgtcttctccattggaatgtaaactccataaaaacaggtactttgggctgggtgcagtggctcacacctgtaatcccaacgctttgggaggctgaggcaggtggatcacttaaggtcaagagtttgagaccagcttggccaacatgacaaaaccttgtctctactaaaaatacaaaaattagctgggcgtggtggcaggtgcctgtaatccttgtgaaaataaatagtttaaatactagctccatttcttttcccaaatagagctcaggtttactgtcttttcattatctttccaatattttaacatgagacttagagggttatcagagggaatcatattatctgctttgctctttgtagtttttgttttactagggttatttcccatcctggaagttttagatgtgtccctgagtttcctgactgtatggggttcaacctctcttactagagatttcttgcaccctttccctggagacttaacccccctccccactggaggtttcttgcactcctttactttactccacactcgctttgcacttaattgtgcatctcattcacatactttcaacctccaggatgtcccaaccaccaaagaagtacttcactgcccctgcggcttttcttaccttggtctgtgcacagaattacttggtcaccatggcatctgtaggccttttccttccatgttgctgagagtctcggtatattcatcatgctggtgggtctcaatccctcattcttgaggctgctgcagtgagacacgtctcctcacaagagatgattggagacccttctccggaggagaatgggatcccagatgtgcccccattttgttagaaacaagtgctcagtgcctcaaagaaaagccagcacttagacagaacatttctcagcaaggcacatttacttctgcagaagggtgctgcctgcatccgtctgattgcaagagcataccaaacaaaggagagaaaagtttttatccctaacgcagctcctgttactgtgtcctctccccattggcttgagttggactgaacaatctaacccaattattggctaagacttaaacttttctacatatggtaaatatgccgtttgcaagaggaggggaggaagagactgttgctaaggtgggaaaggtagtttacagaacaagtctgggcatgtctgggcatatagaggtttgctaattacaaattaagcaaggggtggggcctgtgtacagagcaagaaagaccaagggagctttgaagagaaacttattatttctgacatagttgtgttcaccaacccagaagtgctcctacccttgtcatttaggaactttatgaaggttttgttacataggtcaatccccaccccccactctgctcccagtgtcactggtagagggtgttgactgcaagttgtccaggttcttggtgttttgaacaaagaattggacaaaatgcccagcaaagcaaagaaagcatgaagcaacaaaagaacaaaagcaggaatttattgaaaatgaaagtacactcggcagtgtggaagtggacccaagcagcggctcaagggcctggatatagaatcttcttgggtacaaataccctgcggaggtttcccattggccactttatgctcacgtcatgtgaatgaagtggtatcccacaatcagtctgatgggttgcctaaaaccaccaatcagaagcttaaatggagttacaaaggtcacactcctgtggaaacatctgattgctttttgcaaccaatcgtaggctaaggtgaagttacaaagttgcaaatgaagactccacccacaatcagtttgattggttgcagacagccaatttcccatctgccagcagaaaacgtgggagttttgcaaagggagtagcctctggtccttttgttctttaggcctggaaagttagggttttcctttgaatttagttctaggaagtgagtgtgaaactgtcttaggttccctgcctccagaccctattctcctgcctcaccaggaggtgggcatgagagttggggggtatctggaagtttcagtcctcaatcatgtggttgatttttctggtgaccagcctctagactgaagctatgtagtcctgcccactgagagtcatctcattagcatacagaagacagtaaattccaagggctttagggactctgtcccaggaaccagggacaaagaccaaatacttatttttcattataccacagatacctgttagggttttgttattgttgtttctacaaaacattcatctattcttgtgttcaggagaagtaatatcttcagtcatgattagatttcagatatgaaagaatttttgctagtcttagcccccagttgtaaaataatgtcatgaaaacatttttatttcctaatgattataacaaagggaaaagatcttaaagagttgactttggtagtacaagtttgcgcaaatgattgatgattttttatttccttgatttgtgcattagcagcttttagtgtgtcatatcaagaggaatactggggaaataatataatgattgtttatatggagttctctactttcttgttttggcagtgtttgaaagttaggactgatcctgagggagttgaattttgtaaagttaattactttcctgctgccagtagtgatttatatctgtgatattatatcagctagtcatatgagaatgagaaacaaaattactttttctgcaattaccaactcactagtagggtattcaggtgtccctgggtagcacacaatataatagagtaatgggtaaaacttttttccaatttgaacaaaaaggccttgtcaactttttttaaggtctcttgatacatatataaaagaaatcataaagagcacttggtatatagggaacataattttttaaattacttttttaaagagaggtcaaatttatctgtagcgacccagactagagttcatcctcctattttcttgtaggccaagaaggaaagaaagttatcagatttaacctatcaaaaattttgactatttattggatatcatccaagtgatcttaaaattaaaatatatatatatatgtctatgtatgtatatacgtacagacaatcctttgtatctgtgggtttcacatccgtggattcaaccaacctcagattgaaaatatctggggaggaaaatgaatggttgcatctgtacttagtatgtacagacttttttcttattattatccaaacaatacagtataacaactatttatatagcacttatattgtatttggtattataaataatctagaggtgatttaaagaatacaggaggaggccaggcacggtggctatgcctgtaatccctgcactttgggaggccgaggtgggtagatcacgagatcaggagatcaaaaccatcctggctaacacagtgaaaccccatctctactaaaaattcaaaaatttagccagacatggtggcactcgcctgtagtcccagctacccaggaggctgaggcaggagaatcgcttgaaggaagcggaggttgcagtgagctgagattgtaccgctgcactccagtctgggcaacagagcgagactccatctcaaaagaaaaaaaaaaaagaatacaggaggatgtgcagaggttatatgcaaatactacaccattttatatcaaggacttgagcatccatggattttgatatcctcaggggtcctggaaccaatccctctcagatacctagggacaactatattatgtgcctgtgctgtatgtgtaacatcttctcaaaagttacattgtcaagctcattcctcctgatcataatttctcagttcttatgatgggatatggtttttatagtgataagatgtgaaatgtattaaactgtgaaaatgtaatcagtgatttctgggggggttgtatgtgtgtttaccattctatcactggatcaaaatatatgcctttgaactaaggtgagacatccatagcctggtcctctgttgccaatggcaagatagagttagtaaaatattctaagattcacagtggggtggttctttaatttattttgattttcatgactgtgtatacgaaggatagagatgctttttaggaatgcctaggtttctgacttttagttgatgtgttaaattatacattcgagcaatctggtattgggtaactgtcaaattttgatacttacagaagtaggcagatgagtagttatttggttttgtggtagcccaagttactgagtgagctgctaggataattctttggctactaagttccaggccatacttgagagtccaggcccacatttagattttttattttgaaggattaagccatgcagtagtggtagctatgggttacagcgagaaacccctacctcaatatcttttatggctatgtttccagtgacttcaatgagccttctagccttactagtacttatctaattattttatcttttaaaaaaatattttagccaacatttaattcaaaagaaaggttgaaatgtagcctactcatggaaaatattgtctataattctatttctttagcatactgagtctcctgcatcttgatgctatatttagatataatcaatgttctacaatgggaaaacttagtagaacattgggcatgtgtgtgtgtgtgtgtgtgtgtgtgtgtatgtgtgtgtgtgtgtgcatgtgtgtctcaatgtatatttaaataaaatttgccattccagccattttttaagtattcagttcagtggcattaattatattaacagtgttgtgcagccatcaccactatttccccattcctcctccctcagcttccagcccctggtaacctctattttactttctatctctctgaatttgcccattgtagatattttatgtaagtggaatcatacagtacctgtctgtttgtgtctggcttatttcacttagcatgatgttttcagggttcatccatgttttcgcatgcttcattcctttttacggctaaagaaaattgtgtgtgtgtgtgtgtgtgtgtgtgtgtgtgtgtgtgtatgtacatactgcattttgtttatgcatctgttgatagacatttaggttgtttcctcttcttggctattgtgaataatgctgcaacacactgggcattttgatctgtggtatttggcggtctttggcatatttttaaataaagaagcattgtttatatgtttctttgctataaaatatgaaatattttcattgtcttaataaaagacagaagcaaagcctctacttatatgtaatgaaaagataaaattaaatgtagtgagactatgtcatcaaactttatcgtgcctcctaaccgctttatcagtatgagagtatttccccagagaaggctggacatatcatcatcagcccccaaaccatcctgtttataaagcatggcaggcaattatgcttcccccaaccccagaaaactaaaagaaaaacttttggttactctgtaatctttgaaaagaaaaaattaataaggtattgctttataagatttaatcttagatgttctgaagaatactttttcttctttttttaagaattaagttttaactcaggtaatttttactacacctttttttttcttcaaaagtcacataagtcactttttttttttttttttttgagatagagtctctgctctgtcgcccaggctggagtgcagtggcactatctcggctcactgcaacctccacctcctgggttcaagtgattcttctgcctcagcctccctagtagctggaactacaggcgcccgccaccacccctggctaatttttttgtatttttagtagagatggggtttcaccatgttaactaggctggtctcgaactcctgacttcaggtgatccacccgcctcggcctccaaaagtgctgggattacaggcatgaggcaccacgcctggccaagtcacttcttatagatggtttcacagaatatttccttcactttttggagactgtttagctttccaagtattttcaatcataactcatatttggtggttcatatgctgaaatattacaattacacaaagatgattattttaccttgttactgtacacatagattgcttcttcttatttttattttttcgctggttattgtctcttgattaatacataaagatctatgcaacttggcctggtgcagtggctcacgcctgtaatcccagcactttgggaggccgaggtgggctgatcacttgaggtcaggagttcaagactagcctagccaacatggcaaaaacccatttctactaaaaatataaaaattagccggatgtggtggcgtgcacctgttgtcccagcaacttagaaggctgaggcagaagaatctcttgaattcaggaggcagttacagtgagccaagatcacaccactgcactccagcctgggcgacagagttagactctgtctcaaaagaaaatgaaaaagaaaaatctgtgcaacttgtgtagtaatttcatttatacagtcttcagtcatgggttgtctacaaacttcatcaataaacaaatgagcttgcccttcagggttgcccttctggggccaaatgtgggctctgagacagccacattctggtaacccgccggatgatttgggtgttttagctggcggaggcagtgacctcagactctggacggtgaacggggatctcgttggacatgtccactgcagggagatcatctgttccgtggctttctccaaccagcctgagggagtatctatcaatgtaatcgctgggggattagaaaatggaattgtaaggtaagaggaatttggattctctttttttgatttcattcataaggacacaggagtttcagaaattaatttttaatatctaggcatattaatattcagtatttagagatttaaactcaccttggggtgtaggttctttagttattcctgttttatttctaaataataaagatagctttagcacagttttgaagttttatgttaactataaaagattaacagtatggaagtatacaaagttaaaagttctcttattcccacatctaccccctgcaaactccctagagggaactactgttaattgtttgttacatttccttccacatgatttttaacaaataaacaaatatagagggctttttagggagagtaattttagtttgcataattagatgatttttttcccctctaggttatggagcacatgggacttaaagcctgtgagagaaattacatttcccaaatcaaataagcccatcatcaggtaagatcttctccccctcttatgcttcagaatacaatttgtgattgtatttttcgtagagaggtatttaagcacacagacttaaagaaatgtgcaattgaagtcatcatgaaaagccaaccacttaacacacagcgggttgtccgtgacccagcagcaagagagaccacactccttgtcttcatggagcttaaaatccgagtcagtgactcagagtctagtggaaaggcatgcttgtagtgtgtctctggaatcatagagactgtattttttcctttcatatttgacaagaccataatggtgattgatagctgcaggggtgcttgacaaaatagataaataatcagttactctttgcttagttaacaaatttgactttaaataattagaaataaagtgattcaaattttactttattaaattaaatgtattttcagtgtactaaatttaaagtttaaggaacctaaattaattactaatgttacatttttttccttttctcttttagggaaataatatatagccataaaatacttatttatctttataaggagaaaatatagtactgttatatttttaaaagttttgtacacccaaatatttgttgtttatgtaataaagcataaacaaggaggcaaaagaagatatgcaaagaatagaatgtactgagctttgtgatcctgattttattctatatcaccgcatttatgagcatctcaacttgtcagcagagtgactatgttagaattacagtcaaaaccaatgagttgtaggcagtcatttagtttatgtctctctgcgccactgaagataacttctttacactaacctcagtatgatgaccaatatgctaatacacttttaagaaatataatgtacaaatgggaatttttttttttttacagccttacattttcttgtgatggccaccatttgtacacagcaaacagtgatgggaccgtgattgcctggtgtcggaaggaccagcagcgcttgaaacagccaatgttctattccttccttagcagctatgcagccgggtgaatgcgaatgaacttcacgttctccaaagcactttaactccaaactagatttgttgacttcaccagttttaggaggttgaacctaaagaaatggatgactggacaaaccatccaaataatgataaagtctattcatctgcacaaaattctgaagagtcacatgatcctaagaggaaagttctgttctattttagtgataatctggaagattgtgtcaatatgcactagccaacaagttttaagcctcgcatggtacattaaaatgatattcttaaaattttttcccaccaaggtattccaaagaaaatattaaggtctcccctttttctatgattccaaaaggaccagtagaatttaaattggttggttgattgtttatataaaacacactaaaattatattttaaaagtttactgccatgaaatactcctcccaccacacacacatgctccaaaagaggaaagaaaaaaagataatttttaggacttgataattgctttctttgagaagcaaattattcagtaggtgcctctgtaccaaatattttatggaatatctaaatactaaaataaactatgaatgaatctcaaaattaggcagtttttgccagttgctttcttagctcaaaggagaaccagaatttttttgacagccacaaacaagaatacaggtatcttggatttcagacacattctgtttcttcataaaaattttacttaaaatctgtaacgctagatattgactatccttagttgagtcactgaggtttaaacacaatggtaagtcttaaagtctgctatttacagagcattgaatctgtaccaatttgcaatagaaagccttcagtatgcaagaagtttgcatgggtattaagaacacagcctaaataaggcatttgatctaatctgcaggaagaattttcttccccaaaacagaattataaaagcttactttaaacaggaggcagaataattcttttaggaaaccatttcattctgtttctactaacctataccatctgagaattctaggaagaataataaaatctcgtgtattccacagcaaacttacataccataaagacagaattcctaaacatcttggagccgtctgtctctcccatatgatggctgtctgtatatttttacttggggtgctgctttattggctttgaaaacactgtcagataagctcagtaatatgttaccatgggataaaaatatgtatccctgcctaagaataacttgtgcatttgttatggaaatttaattcatatggtgtttacagtactacttttgtaacttccagactttctaaaacattctgcttaaaaaccatataaaatataattccaaagtctctgctgtcaagatagattcgagagaaagcacgtggccatgtatgctttaaccttaaactgcatacacatgtagtgatacctaggctgcatttagatcaccgtgtgctcaggccaggtgtgaatcctgaggtccatggaggtgcagagatgagattactcctattcacgttgaagtgatttgctttgttaacaaaaaattgcagctattgtctagctttcatttttttactgagaactttaaattagtcccctattagaatagggttgctactcatctttttttaaaaaccgaatttcatcatttatctaaagagaaaatatgcagaataactggtcttgttaagagtgcaatattatatttttatgtaaaaataaaaattaatttggggggattatttattcagcatgaaacctaatatgtatatgtttgaaatacttcataatgtgcatgttgtagcaaacatttctgtaaattatcacaagctctgttacctttatatacactgcctcttcaatttggaaataaatttcataaaaatagatgtaaacacctcttctttaagctatttaaatattatgagcagatctcaaatcgatggctttctgtgtaacccacataggttctgtctttagctccactatgcatttatatcactagaaaaagataactttcttttttttttttttttttgagatgtagtttagctctgtcgcccaggctggagtgcagtggcacgatctcagctcactgcaacctccgcctcccaggttcaagcgattctccagcctcagccttccaagtagctgggactacaggagtgtgccacgacgcccggctaactttttttttttttttttttttttttgtatttttagtagagacggggcttcaccgtgttagccaggatggtctcaatctcctgacctcgtgatccacctgccttggcctcccaaagtgctgggattacaggtgtgagccaccacgcccggcctaactttcatttcttattgtggtttttgtactaaaattttatgtttcaacctttactacccttagatggtgtggacactagtcccaagatcaaaccgctcattttaaagaaaaaaccatctgcccacccccgaccccacagcagatctatattgagcccttgccaggtgccaggcactgtaccaagtgctgaggatatcgtgctgcacaaagcacggtggtcccctgcactcctggaggttacaggctggtggagaaaccaccataaataacacacaatatgtacagttacaaaccatggtaagtgttaggtaaaatatagggtactctgaaagaatgtaagaggaaggactttatttagattgaggtgatctagaaagcctcttgaaaaattgaaatttttggtgaggcgtggtggctcatgcctgtaatcccagcactttgggagggtgaggtaggcagatcacttgagatcaggagttagagaccagcctggccaacatgatgaaaccccatctctactaaaaatacaaaaattagcaaggcatggtggtaggcgcctgtagtcccagctacttgggaggctaaggcaggataattgcttgaacctgggaggcagaggttgcagtgactgagattttgacactgcactccagcctgggcaacagaacgagactccgtctcaaaaaagaaaaattgaaatttctgttgaaacccaatgaatgatcggaaatttggtgaagatgggggcagatgtgttccagataatacatgttcaataactggggcaggaacatcagcaaaggcccagggaaggaaagaacatcctgtccctgtctcagcttcttggtgggtgagggtgggagtgaaaacggtgggtgacgtcaacaacagcagtccaagggcccgagggctgcccttctttctgctttgcatctgtggtattttaagattctcaagactacagcattcctgttcctaggtgtctgtcccaaagagaactgagcagtagcattttgtcggtgtgagcctgccaacccagatgtcccctctttacctgaaagtctcagttggactcaccctttccacaatgttcactgaacgccagttctgtgcaagcccgaggctagaggctgggtggggaagggaggggagcgggattctttccagctcgaaagagctcatgcagcgggcgcagtggctcatgcctgtagtcccagcactttgggaggctgaggtgggcggatcatgagctcaggggctccaggctagcctggccaacattgtgaaaccccatctctactaaaaaatacaaaaattaggcaggcgtggtggcacgggcctgtcatcccagctactggggaggctgaggcatgagaatcgcttgaacccaggaggcagaggttgcagtgagcactgcactccagcctgggcgacagagcaagactcagtctcaaaaaaaaaaaacaattaaaaaaaaaaagagctcatgcctggtgacctgcttctcactattttggatgacgtgtttatgttctgaggggaaaagcaaaaaaaaaaagctacaaggccgatttttttttttttttttttgagatagagttttacttttgttttccaggctggagtgcaagggtgcaatctcggctcactgcaacctccgcctcccaggttcaagtgagtctcttgcctcagcctccccagtagctgggaatacgggcgcctgcagcctcgcccagctaatgttgtatttttagtagagacgaggtttcaccatgtgggccaggctggtctcaaactcctgacctcaggtgatccacctgcctcggcctcccaaagtgctgggattacaggcgtgagccactgcacctggcaaggccaacgtatataaaaatgagaggaaacaaactcaacgagtgaacattttttatcagtaattgcagaacaatgggagttcttggattatgcatgttgcaggccctctttgctgattatccttcaggtgtccccagtttgtcccaaactgtctcacatcttggtcagctatattattttttcattgtactccttctcaggataacactccatgtactatgaagccaaagcactttaaaacctaatgagcttaaaaccttgaagcagaaagaccaactgaaaagcattagcagttggagggtagatgggaaggaaacaaaacaactgctactggagagaacaattcaccactgaggtcaaaggtagcaaaagagcttgtaggttgagcacaaactggtattgtggagtattgcaaaagcttcatgttgcatgcaggatttcccccagtcgttttcaactgcacaattaaggcagctacatttgccgataccaaacatatacacgtatatgcacattgagttgagaaagaggtgccacctatatcatgtgtcatgtgacaacagaaaactatatcttgccactttggggacactgggttgcaactcagctgtttgagagaaattaaataatacagtgtgtcctttgaggccaaaatgactagaagatcatttgagactaggctacaatattcctgctcaagagctgagttcgtttcttccttcatgaaggaagttaatgagagatgagtttgaaaaaggttgtctcgtggcaaagtttggctcattgccaaagtaaagtaaacaggtcttaccaaaacttctgaagactgatgataatgaactggtgtttcattctcagattttaattttgttaaaatagctgtaaaagtccttggaatccagttccaagggtaaataaaaaagactgtcttttctgagacttttagtaaaaattaagctataattttcatagtggttgatataatctaaatacaaatgagtaattaggtaacttcattatgtagtttctatacacaattttctgcacagtagtagtttattacaaccaagtaaaagccacttacctgtgctcctacgtggatatgaattagacatgctattttattttctacaacggtctggagaacagggttaggaggtaaaaggtctcacagcctgaggtggagactagaagaacagctgtttccaccaccctttccaccatgtgcatttttagacccaagcattgtttgttctctgttccctgctgcaggcatttcaaagccagcttcagccccgcctcacggatacatgtgctcagtggtgctgctcactgctttatgtttaactggtagtctctgccactgtgttctcctgaactttaaatttcctcagttattacaaccaattattcggtatatactttgtgttggacaatctttctcttgtgaacatctatgagtttcgaaaacaaaaatcatcagagctgaatctgagaaatagaactgttttcgtcacaaacaagttacagttacgaggtactgaaaaaaaatgtgtgattctgcaagtaattccaaaagaggaatttttttaagattttgagcaatgcatagtatcactggagtagggtagattaggtacttgggagaaacgaaggaagaaagcaagcaagcgtcacaggacggacggacaggtaccatgtcttactgtttcttttcttgattttttgtttgtttgtttgtttgtttgtttcagacagagtcttgctctgttgcccagcctggagtgcagtggcgtgatcttggctcactgcaacctccacctcccgggttcaagagattctcctgcctcagcctcccaagtagctgggattacaggtgcgtgccaccatgcctggataatttttgtatttttagtagagatagggtttcaccatatgggtcaggctggtctcgaacttctgacctcaggtgatctgcccgccttggcctcccaaagtgctgggatagaggcatgagccaccgtgcccgtccttcttgatcatttttaaaaaaacttcccaaccccaaataaactaccaagtcctgcttgcttttctttgtgtttggataacgtctttcacaaaaatgaagcccacactagattatcttcacttacacactttccttggagtgaacttatttgactcccctaaagggtctcttaactcttttcttgtcctccgttttagtagattacagttcttccttatttatctcgggatagttcttatacaaatattaaaacaagcataaaagtgacaagagttgtgtacacatgtcctgtcagaaacgacaaaagctccttttagatccactgaaaaaggcttatttagagccctatttaagaccaacagtttcattatcattcagggacaaattgtgccagaagcaacctgtctctctttcaatctggtaatccttatattttctctatgcagtaaatcgctccatattagacaatattttgcagtttttattatcctgttatcagttgatgcttgggaactttttatcgaggaataacattcaaaagctaacgctgttcttttagtaatttccttcctaagtgaggccactcatacaccaaactacctttgccaaatctttaaaaaaaatttaaatttaagcaaatcaatgagtacatggtttttcttgatgtcccattaaacatagagcatggttgctcattcttttaacatttttgggcttctacaacataccagatacaaagatttatgacagagaatctgctctcaaaagaactcgatgagaaaggaaatgtaaaaagagaactgtgacacaaccaagtaacttttataatagaagcatctacatatcaaggtgactcaaatgggaagtggggagcagtcagattaggtttcccaaagatattaaagagataggaaaatcttggccaggcatggtggctcatgcctgtaatcccagcactttgggaggccgaggcaggtggatcacctgaggtcgggagttcgacaccagcctgaccaatgtggagaaaccccatctctactaaaaatacaaaatttagctgggcgtggtggcacatgcctgtaatcccagctactcgggaggctgaggcaggagaatcgcttgaacccgggaagcagacgttgtggtgagccaagatcacaccattgcactccagcctgggcaacaagagtgaaactctgtctcaaaaaaaaagaaaaacatatatatatatatatatatatatatatatatatataaatataaatcttgaagacaaaaatttaccagatttgggccaaggtagaaggaaaccaagactcaaaggtataagaagacagggagtggaagtgctcagtgtgtcagagacagaggtggaagaggggatggggggaaatgagggttaaactataatgggaacttctgcctctgtccacttggggaaaactgagatcagacttaccccgctatcaaaaacaactgggaaacgagatgatctatgaggcaatgattttcagtgtggaaagcagacagcacaagatatgatgcctgaaggaagggaaatgaactgagtaaatcttattgttgtcttggttttctgtacttaaaaggtagctacagtgcagaaggagatccaaagaagagtacagaaatcacgctgagatgaggaaatggagaccagagtttgggggaggctgagaaaccagaatttgtggcacagagtaccatacagtaggttgctgcccagcaatgaagagatccagattgaaaacagaaatcatcacagctgaatctgaaaactagaactattttagtcaaaaacaagttatagttacaaggtactgaaaaaaaatcgtgattctgcaagtaattccaaaagaggaattttttaaatgttttgagcaacgtacagtgtcattggaatagggtagattaggtacatacttggaagaaacgaaggaagaaaggaagcaagcatcacaggccggatggacagatactatgtctcattgtttcttttcttaatagtttttaggaaaactttccaaacccaaataaaccaccaagtcctggttgcttttctttgtctttggataatgtctttcacaaaaacgaagcccacccttgattatcttcacttacagggtaatgcctgtgggtccaatggaggctctggctgaatactaagctgtatgtgcataacacaaagctccatgggtctgagcaaagaatgtacaggcagctgtaagctgaacaattctcggagctcacaggggattcggatacatctgagttccaacccaccaaaggggaagagttcactgaacacacaggcattcaactgcgaccccagaagagtcacaccctagtaggaaggctaaactagtcctagaataaactaatcctataataatggctacgagcctttaagacaaccatcaaaaggatcgaacatctgtaaataaccaccttccaaaacaaagtccctattctttaaaagaacacagcatctactagaaatacaaaaattagctgggtgtggtggtgcacttatggcacaatatcaaatggtctatcatatctgtgattggagtcccagaaggagaagagcaagataatgggtgaaaaatttttaatttgatatattttgataaaaattgtaaacctacagatccaagaaatccaatgaacaccaagcagcataaacacaaagaaaaccacatcaaggcacatcataatcacactgttgaaaaccagtgatagaaaacttgacaatcagccatagaaaaagagacgcattacatatccaggaaaaggataaagatctgcagatttcttttttttttttttctttttcttttcctttttttttttttttttttttttttttgagacagagtctcactcttgttgcccaggctggagtgcagtggtgtgatctcagctcactgcaacctctgcctcttgggttcaagtgattctcctgcctcagcctcccgagtagctgggattacaggcgcccacaaacacgctcagctaattttttgtattttttagtaaagatgtggtttcaccatgttggccaggctggtctcgaactcctgacctcaggtgatccacccacctcggcctcccaaagtgctgggattaccggcgtgagccactgtgcctagcctggagatttcttcagagaaagtatgcaagcacagtgaatgatatctttaaacttcttcaagatgtcaatctaaaaaaaaaatcctccaaaaacaaaggcaaaatacttatattcagaaaaacaaaaacagacaatcaccagccaatctgtattaccaaaagaaggttaaaaaatgttctacaggcagaaggaaatgatatcagatagaaatctggatcttcacaaataaatgaagagcatcagaaatgataaaagatttttcaaaatcatttctaaatgtttcaaaagaaaattgacagcttaaagtaaaataatgttctgtggggttattacctatgtaaaagggagatataacaaaaataatacaaaggatggaagagggggaatggaagcacacactataaagaatctaatagtgaagaagaagtggcatgatgttatttgaaggtagtcgacggtaaattaaagatgcattttataaaccctagaacaaagaaagaggaggaaaatgaaggtcaatacttgagataaaatggaatactaaagtatactcaggcaggaaaaaaggaatgaagaataggacaaacagaaaacaaatagcaagttggtagttttaaacccaaccacatgataattacataagaagtaaatgaactaaacattccaattaaaagtagagatggggtttcaccatgttgaccaggatagtctcgatctcttgacctcatgatcctcccgcctcgacctcccaaggttttccttctttatccctagtcatattctttgttctgaagtcttctttgtttttatctatataaccactgcggattttttactattagttgtcaagctgacagatcgtcaagctgaattttaaaagcagatccagctctgtgctgcctacgaagatggagaatcccacttttaagaacaaagatacaggccgggcgtggtgactcacgactgtaatcgcagcactttgggaggccgaggtgggaggatcacccgaggtcaggagtctgagaccagcctggacaacaagttgaaatccggtctctactaaaaaggcaaaaattagctgggtgtggtggtggacgcctgtaatcccagctgctcaggaggctgaggcaggagaatcacttgaacctgggaggcggaggttgcagtaagctgagatggcaccattgcactccagcctgggcgacaagagcgagagtctgtctcaaaaaaaaaaaaaaaaaaaaaagatacagatagatttaaaaattaaaaggatataaacacatatcatgcaaacactaatagtaagaaatctgcagtggttatatagatataaacaaagaagacttcagaacaaaggatatgactaggaataaagaagaaaaaccttgggaggccgaggagggcagctcatgaggtcaagagatcgagactatcctggccaacacggtgaaaccccatctctaccaaaaatacaaaaattagctgggcatggtggcgtacgcctgtagtcccagctactctggaggctgaggcaggagaatcgcttgaacccaggaggaggaggttgtagtgagccgagatcgcgccactgcactccagcctgggcgacagagcgagactccctcccactccgcaaaaaaaataaataaataagaagaaagaaaactgatacccagggtcctggtgccagactttacactactgcagctatcctgggtgatgtccagagatgaacggaatcagaattacctggagggtttggggaatcacaggttgctgggccccacccccagagtttctgattccttaggtctgggtggggcctgggagtctgcatctctaaaagattcccaggtgacacgctgattctactggtcttgggatccactctggaaccacttgttgactgacctcttcctcctgtttaaaactgacatgatcctatcttgaatgatagtgtaacaattagaaagataaaataaggaaatgatgcgcttgaaagtgtagacactgatttcccttgtgattgattaattgagattgggatttgggataaaaggaaacctaggattctgccttagccaaccagtcgggggcgggaggtgggcaggaaatgcaggagaaataagattttggggtgaaaacaatgagctagggtttggatttgcttgaattttcaatgcagtactcatatatctttctcacttttaaaagtctgtgaggtggacatggactggcttcgtcggtttgccaaggtttaattttgtgccttaaatgggcacttgagagctttgtaaaaaccgatgtgtttgctggccccgtgtttacgggcctttgtgatctccgcgttcgcatccaatctggcccttgggctccgagaaggtacacgtgtgtgtagggcaaggtccaaccagtggggccagggatctgagcaacaagcgcgccctgtgtcctttgtggcagggaccgc

SEQ ID NO: 3212 - DNA, 5248 bp, Homo sapiens
tgatacaagcgtggccacctgccaaagagccagagggagagagggccactcgccttcctggtgacacagagatttcctagccccgttaccaaacgaaaaagcaacgcaagggcttctaagaagccatcccaatgaccttttggctttgagaagagcagtcctcataccagagtgtttggggttttggcctctttcagtgtttattcattcttacgtgggaaagttgtattccgaggtttctgtggtgcatgaagcttttgccttcaccatctgttcccgtgtcttcctcgggtgacatcagagtacagcagtattttcccttgccatctaatggggtttgggctgtttgactcaaccgtgtgtgttcctcaatgccaggggaataatcctaccctaagtcagctgaacagaagccaggatctaactgcaaacaagagacccagcttgcttaacagcatggaagagaccagtttcgttgcagctacctgggaagacggttgctaattagcctgcaacaaagagttccttgctcatctaaaagaggcaatcaccgttcaggtgaagctttgttctaagaatatttgtttcatctagtttatgagtccaaatgatatagactgtaaatgtcacagcagtggtgaaagactgctcggtcatgagcaccgacagtaactcactggcacgtgaatttctgaccgatgtcaaccggctttgcaatgcagtggtccagagggtggaggccagggaggaagaagaggaggagacgcacatggcaacccttggacagtaccttgtccatggtcgaggatttctattacttaccaagctaaattctataattgatcaggcattgacatgtagagaagaactcctgactcttcttctgtctctccttccactggtatggaagatacctgtccaagaagaaaaggcaacagattttaacctaccgctctcagcagatataatcctgaccaaagaaaagaactcaagttcacaaagatccactcaggaaaaattacatttagaaggaagtgccctgtctagtcaggtttctgcaaaagtaaatgtttttcgaaaaagcagacgacagcgtaaaattacccatcgctattctgtaagagatgcaagaaagacacagctctccacctcagattcagaagccaattcagatgaaaaaggcatagcaatgaataagcatagaaggccccatctgctgcatcattttttaacatcgtttcctaaacaagaccaccccaaagctaaacttgaccgcttagcaaccaaagaacagactcctccagatgctatggctttggaaaattccagagagattattccaagacaggggtcaaacactgacattttaagtgagccagctgccttgtctgttatcagtaacatgaacaattctccatttgacttatgtcatgttttgttatctttattagaaaaagtttgtaagtttgacgttaccttgaatcataattctcctttagcagccagtgtagtgcccacactaactgaattcctagcaggctttggggactgctgcagtctgagcgacaacttggagagtcgagtagtttctgcaggttggaccgaagaaccggtggctttgattcaaaggatgctctttcgaacagtgttgcatcttctgtcagtagatgttagtactgcagagatgatgccagaaaatcttaggaaaaatttaactgaattgcttagagcagctttaaaaattagaatatgcctagaaaagcagcctgacccttttgcaccaagacaaaagaaaacactgcaggaggttcaggaagattttgtgttttcaaagtatcgtcatagagcccttcttttacctgagcttttggaaggagttcttcagattctgatctgttgtcttcaaagtgcagcttcaaatcccttctacttcagtcaagccatggatttggttcaagaattcattcagcatcatggatttaatttatttgaaacagcagttcttcaaatggaatggctggttttaagagatggagttcctcccgaggcctcagagcatttgaaagccctaataaatagtgtgatgaaaataatgagcactgtcaaaaaagtgaaatcagagcaacttcatcattcgatgtgtacaagaaaaaggcacagacgatgtgaatattctcattttatgcatcatcaccgagatctctcaggtcttctggtttcggcttttaaaaaccaggtttccaaaaacccatttgaagagactgcagatggagatgtttattatcctgagcggtgctgttgcattgcagtgtgtgcccatcagtgcttgcgcttactacagcaggcttccttgagcagcacttgtgtccagatcctatcgggtgttcataacattggaatatgctgttgtatggatcccaaatctgtaatcattcctttgctccatgcttttaaattgccagcactgaaaaattttcagcagcatatattgaatatccttaacaaacttattttggatcagttaggaggagcagagatatcaccaaaaattaaaaaagcagcttgtaatatttgtactgttgactctgaccaactagcccaattagaagagacactgcagggaaacttatgtgatgctgaactctcctcaagtttatccagtccttcttacagatttcaagggatcctgcccagcagtggatctgaagatttgttgtggaaatgggatgctttaaaggcttatcagaactttgtttttgaagaagacagattacatagtatacagattgcaaatcacatttgcaatttaatccagaaaggcaatatagttgttcagtggaaattatataattacatatttaatcctgtgctccaaagaggagttgaattagcacatcattgtcaacacctaagcgttacttcagctcaaagtcatgtatgtagccatcataaccagtgcttgcctcaggacgtgcttcagatttatgtaaaaactctgcctatcctgcttaaatccagggtaataagagatttgtttttgagttgtaatggagtaagtcaaataatcgaattaaattgcttaaatggtattcgaagtcattctctaaaagcatttgaaactctgataatcagcctaggggagcaacagaaagatgcctcagttccagatattgatgggatagacattgaacagaaggagttgtcctctgtacatgtgggtacttcttttcatcatcagcaagcttattcagattctcctcagagtctcagcaaattttatgctggcctcaaagaagcttatccaaagagacggaagactgttaaccaagatgttcatatcaacacaataaacctattcctctgtgtggcttttttatgcgtaagtaaagaagcagagtctgacagggagtcggccaatgactcagaagatacttctggctatgacagcacagccagcgagcctttaagtcatatgctgccatgtatatctctcgagagccttgtcttgccttctcctgaacatatgcaccaagcagcagacatttggtctatgtgtcgttggatctacatgttgagttcagtgttccagaaacagttttataggcttggtggtttccgagtatgccataagttaatatttatgataatacagaaactgttcagaagtcacaaagaggagcaaggaaaaaaggagggagatacaagtgtaaatgaaaaccaggatttaaacagaatttctcaacctaagagaactatgaaggaagatttattatctttggctataaaaagtgaccccataccatcagaactaggtagtctaaaaaagagtgctgacagtttaggtaaattagagttacagcatatttcttccataaatgtggaagaagtttcagctactgaagccgctcccgaggaagcaaagctatttacaagtcaagaaagtgagacctcacttcaaagtatacgacttttggaagcccttctggccatttgtcttcatggtgccagaactagtcaacagaagatggaattggagttacctaatcagaacttgtctgtggaaagtatattatttgaaatgagggaccatctttcccagtcaaaggtgattgaaacacaactagcaaagcctttatttgatgccctgcttcgagttgccctcgggaattattcagcagattttgaacataatgatgctatgactgagaagagtcatcaatctgcagaagaattgtcatcccagcctggtgatttttcagaagaagctgaggattctcagtgttgtagttttaaacttttagttgaagaagaaggttacgaagcagatagtgaaagcaatcctgaagatggcgaaacccaggatgatggggtagacttaaagtctgaaacagaaggtttcagtgcatcaagcagtccaaatgacttactcgaaaacctcactcaaggggaaataatttatcctgagatttgtatgctggaattaaatttgctttctgctagtaaagccaaacttgatgtgcttgcccatgtatttgagagttttttgaaaattattaggcagaaagaaaagaatgtttttctgctcatgcaacagggaactgtgaaaaatcttttaggagggttcttgagtattttaacacaggatgattctgattttcaagcatgccagagagtattggtggatcttttggtatctttgatgagttcaagaacatgttcagaagagctaacccttcttttgagaatatttctggagaaatctccttgtacaaaaattcttcttctgggtattctgaaaattattgaaagtgatactactatgagcccttcacagtatctaaccttccctttactgcacgctccaaatttaagcaacggtgtttcatcacaaaagtatcctgggattttaaacagtaaggccatgggtttattgagaagagcacgagtttcacggagcaagaaagaggctgatagagagagttttccccatcggctgctttcatcttggcacatagccccagtccacctgccgttgctggggcaaaactgctggccacacctatcagaaggtttcagtgtttccctgtggtttaatgtggagtgtatccatgaagctgagagtactacagaaaaaggaaagaagataaagaaaagaaacaaatcattaattttaccagatagcagttttgatggtacaggtatgatgacaggattatctgatttgtacacaaagattgttttcagacta

SEQ ID NO: 3213 - protein, 1521 aa, Homo sapiens
MSTDSNSLAREFLTDVNRLCNAVVQRVEAREEEEEETHMATLGQYLVHGRGFLLLTKLNSIIDQALTCREELLTLLLSLLPLVWKIPVQEEKATDFNLPLSADIILTKEKNSSSQRSTQEKLHLEGSALSSQVSAKVNVFRKSRRQRKITYSVRDARKTQLSTSDSEANSDEKGIAMNKHRRPHLLHHFLTSFPKQDHPKAKLDRLATKEQTPPDAMALENSREIIPRQGSNTDILSEPAALSVISNMNNSPFDLCHVLLSLLEKVCKFDVTLNHNSPLAASVVPTLTEFLAGFGDCCSLSDNLESRVVSAGWTEEPVIQRMLFRTVLHLLSVDVSTAEMMPENLRKNLTELLRAALKIRICLEKQPDPFAPRQKKTLQEVQEDFVFSKYRHRALLLPELLEGVLQILICCLQSANPFYFSQAMDLVQEFIQHHGFNLFETAVLQMEWLVLRDGVPPEASEHLKALINSVMKIMSTVKKVKSEQLHHSMCTRKRHRRCEYSHFMHHHRDLSGLLVSAFKNQVSKNPFEETADGDVYYPERCCCIAVCAHQCLRLLQQASLSSTCVQILSGVHNIGICCCMDPKSVIIPLLHAFKLPALKNFQQHILNILNKLILDQLGGAEISPKIKKAACNICTVDSDQLAQLEETLQGNLCDAELSSSLSSPSYRFQGILPSSGSEDLLWKWDALKAYQNFVFEEDRLHSIQIANHICNLIQKGNIVVQWKLYNYIFNPVLQRGVELAHHCQHLSVTSAQSHVCSHHNQCLPQDVLQIYVKTLPILLKSRVIRDLFLSCNGVSQIIELNCLNGIRSHSLKAFETLIISLGEQQKDASVPDIDGIDIEQKELSSVHVGTSFHHQQAYSDSPQSLSKFYAGLKEAYPKRRKTVNQDVHINTINLFLCVAFLCVSKEAESDRESANDSEDTSGYDSTASEPLSHMLPCISLESLVLPSPEHMHQAADIWSMCRWIYMLSSVFQKQFYRLGGFRVCHKLIFMIIQKLFRSHKEEQGKKEGDTSVNENQDLNRISQPKRTMKEDLLSLAIKSDPIPSELGSLKKSADSLGKLELQHSINVEEVSATEAAPEEAKLFTSQESETSLQSIRLLEALLAICLHGARTSQQKMELELPNQNLSVESILFEMRDHLSQSKVIETQLAKPLFDALLRVGNYSADFEHNDAMTEKSHQSAEELSSQPGDFSEEAEDSQCCSFKLLVEEEGYEADSESNPEDGETQDDGVDLKSETEGFSASSSPNDLLENLTQGEIIYPEICMLELNLLSASKAKLDVLAHVFESFLKIIRQKEKNVFLLMQQGTVKNLLGGFLSILTQDDSDFQACQRVLVDLLVSLMSSRTCSEELTLLLRIFLEKSPCTKILLLGILKIIESDTTMSPSQYLTFPLLHAPNLSNGVSSQKYPGILNSKAMGLLRRARVSRSKKEADRESFPHRLLSSWHIAPVHLPLLGQNCWPHLSEGFSVSLWFNVECIHEAESTTEKGKKIKKRNKSLILPDSSFDGTGMMTGLSDLYTKIVFRL

SEQ ID NO: 3214 - DNA, 6658 bp, Homo sapiens
tgatacaagcgtggccacctgccaaagagccagagggagagagggccactcgccttcctggtgacacagagatttcctagccccgttaccaaacgaaaaagcaacgcaagggcttctaagaagccatcccaatgaccttttggctttgagaagagcagtcctcataccagagtgtttggggttttggcctctttcagtgtttattcattcttacgtgggaaagttgtattccgaggtttctgtggtgcatgaagcttttgccttcaccatctgttcccgtgtcttcctcgggtgacatcagagtacagcagtattttcccttgccatctaatggggtttgggctgtttgactcaaccgtgtgtgttcctcaatgccaggggaataatcctaccctaagtcagctgaacagaagccaggatctaactgcaaacaagagacccagcttgcttaacagcatggaagagaccagtttcgttgcagctacctgggaagacggttgctaattagcctgcaacaaagagttccttgctcatctaaaagaggcaatcaccgttcaggtgaagctttgttctaagaatatttgtttcatctagtttatgagtccaaatgatatagactgtaaatgtcacagcagtggtgaaagactgctcggtcatgagcaccgacagtaactcactggcacgtgaatttctgaccgatgtcaaccggctttgcaatgcagtggtccagagggtggaggccagggaggaagaagaggaggagacgcacatggcaacccttggacagtaccttgtccatggtcgaggatttctattacttaccaagctaaattctataattgatcaggcattgacatgtagagaagaactcctgactcttcttctgtctctccttccactggtatggaagatacctgtccaagaagaaaaggcaacagattttaacctaccgctctcagcagatataatcctgaccaaagaaaagaactcaagttcacaaagatccactcaggaaaaattacatttagaaggaagtgccctgtctagtcaggtttctgcaaaagtaaatgtttttcgaaaaagcagacgacagcgtaaaattacccatcgctattctgtaagagatgcaagaaagacacagctctccacctcagattcagaagccaattcagatgaaaaaggcatagcaatgaataagcatagaaggccccatctgctgcatcattttttaacatcgtttcctaaacaagaccaccccaaagctaaacttgaccgcttagcaaccaaagaacagactcctccagatgctatggctttggaaaattccagagagattattccaagacaggggtcaaacactgacattttaagtgagccagctgccttgtctgttatcagtaacatgaacaattctccatttgacttatgtcatgttttgttatctttattagaaaaagtttgtaagtttgacgttaccttgaatcataattctcctttagcagccagtgtagtgcccacactaactgaattcctagcaggctttggggactgctgcagtctgagcgacaacttggagagtcgagtagtttctgcaggttggaccgaagaaccggtggctttgattcaaaggatgctctttcgaacagtgttgcatcttctgtcagtagatgttagtactgcagagatgatgccagaaaatcttaggaaaaatttaactgaattgcttagagcagctttaaaaattagaatatgcctagaaaagcagcctgacccttttgcaccaagacaaaagaaaacactgcaggaggttcaggaagattttgtgttttcaaagtatcgtcatagagcccttcttttacctgagcttttggaaggagttcttcagattctgatctgttgtcttcaaagtgcagcttcaaatcccttctacttcagtcaagccatggatttggttcaagaattcattcagcatcatggatttaatttatttgaaacagcagttcttcaaatggaatggctggttttaagagatggagttcctcccgaggcctcagagcatttgaaagccctaataaatagtgtgatgaaaataatgagcactgtcaaaaaagtgaaatcagagcaacttcatcattcgatgtgtacaagaaaaaggcacagacgatgtgaatattctcattttatgcatcatcaccgagatctctcaggtcttctggtttcggcttttaaaaaccaggtttccaaaaacccatttgaagagactgcagatggagatgtttattatcctgagcggtgctgttgcattgcagtgtgtgcccatcagtgcttgcgcttactacagcaggcttccttgagcagcacttgtgtccagatcctatcgggtgttcataacattggaatatgctgttgtatggatcccaaatctgtaatcattcctttgctccatgcttttaaattgccagcactgaaaaattttcagcagcatatattgaatatccttaacaaacttattttggatcagttaggaggagcagagatatcaccaaaaattaaaaaagcagcttgtaatatttgtactgttgactctgaccaactagcccaattagaagagacactgcagggaaacttatgtgatgctgaactctcctcaagtttatccagtccttcttacagatttcaagggatcctgcccagcagtggatctgaagatttgttgtggaaatgggatgctttaaaggcttatcagaactttgtttttgaagaagacagattacatagtatacagattgcaaatcacatttgcaatttaatccagaaaggcaatatagttgttcagtggaaattatataattacatatttaatcctgtgctccaaagaggagttgaattagcacatcattgtcaacacctaagcgttacttcagctcaaagtcatgtatgtagccatcataaccagtgcttgcctcaggacgtgcttcagatttatgtaaaaactctgcctatcctgcttaaatccagggtaataagagatttgtttttgagttgtaatggagtaagtcaaataatcgaattaaattgcttaaatggtattcgaagtcattctctaaaagcatttgaaactctgataatcagcctaggggagcaacagaaagatgcctcagttccagatattgatgggatagacattgaacagaaggagttgtcctctgtacatgtgggtacttcttttcatcatcagcaagcttattcagattctcctcagagtctcagcaaattttatgctggcctcaaagaagcttatccaaagagacggaagactgttaaccaagatgttcatatcaacacaataaacctattcctctgtgtggcttttttatgcgtaagtaaagaagcagagtctgacagggagtcggccaatgactcagaagatacttctggctatgacagcacagccagcgagcctttaagtcatatgctgccatgtatatctctcgagagccttgtcttgccttctcctgaacatatgcaccaagcagcagacatttggtctatgtgtcgttggatctacatgttgagttcagtgttccagaaacagttttataggcttggtggtttccgagtatgccataagttaatatttatgataatacagaaactgttcagaagtcacaaagaggagcaaggaaaaaaggagggagatacaagtgtaaatgaaaaccaggatttaaacagaatttctcaacctaagagaactatgaaggaagatttattatctttggctataaaaagtgaccccataccatcagaactaggtagtctaaaaaagagtgctgacagtttaggtaaattagagttacagcatatttcttccataaatgtggaagaagtttcagctactgaagccgctcccgaggaagcaaagctatttacaagtcaagaaagtgagacctcacttcaaagtatacgacttttggaagcccttctggccatttgtcttcatggtgccagaactagtcaacagaagatggaattggagttacctaatcagaacttgtctgtggaaagtatattatttgaaatgagggaccatctttcccagtcaaaggtgattgaaacacaactagcaaagcctttatttgatgccctgcttcgagttgccctcgggaattattcagcagattttgaacataatgatgctatgactgagaagagtcatcaatctgcagaagaattgtcatcccagcctggtgatttttcagaagaagctgaggattctcagtgttgtagttttaaacttttagttgaagaagaaggttacgaagcagatagtgaaagcaatcctgaagatggcgaaacccaggatgatggggtagacttaaagtctgaaacagaaggtttcagtgcatcaagcagtccaaatgacttactcgaaaacctcactcaaggggaaataatttatcctgagatttgtatgctggaattaaatttgctttctgctagtaaagccaaacttgatgtgcttgcccatgtatttgagagttttttgaaaattattaggcagaaagaaaagaatgtttttctgctcatgcaacagggaactgtgaaaaatcttttaggagggttcttgagtattttaacacaggatgattctgattttcaagcatgccagagagtattggtggatcttttggtatctttgatgagttcaagaacatgttcagaagagctaacccttcttttgagaatatttctggagaaatctccttgtacaaaaattcttcttctgggtattctgaaaattattgaaagtgatactactatgagcccttcacagtatctaaccttccctttactgcacgctccaaatttaagcaacggtgtttcatcacaaaagtatcctgggattttaaacagtaaggccatgggtttattgagaagagcacgagtttcacggagcaagaaagaggctgatagagagagttttccccatcggctgctttcatcttggcacatagccccagtccacctgccgttgctggggcaaaactgctggccacacctatcagaaggtttcagtgtttccctgtggtttaatgtggagtgtatccatgaagctgagagtactacagaaaaaggaaagaagataaagaaaagaaacaaatcattaattttaccagatagcagttttgatggtacagagagcgacagaccagaaggtgcagagtacataaatcctggtgaaagactcatagaagaaggatgtattcatataatttcactgggatccaaagcgttgatgatccaagtgtgggctgatccccacaatgccactcttatctttcgtgtgtgcatggattcaaatgatgacatgaaagctgttttactagcacaggttgaatcacaggagaatattttcctcccaagcaaatggcaacatttagtactcacctacttacagcagccccaagggaaaaggaggattcatgggaaaatctccatatgggtctctggacagaggaagcctgatgttactttggattttatgcttccaagaaaaacaagtttgtcatctgatagcaataaaacattttgcatgattggccattgtttatcatcccaagaagagtttttgcagttggctggaaaatgggacctgggaaatttgcttctcttcaacggagctaaggttggttcacaagaggccttttatctgtatgcttgtggacccaaccatacatctgtaatgccatgtaagtatggcaagccagtcaatgactactccaaatatattaataaagaaattttgcgatgtgaacaaatcagagaactttttatgaccaagaaagatgtggatattggtctcttaattgaaagtctttcagttgtttatacaacttactgtcctgctcagtataccatctatgaaccagtgattagacttaaaggtcaaatgaaaacccaactctctcaaagacccttcagctcaaaagaagttcagagcatcttattagaacctcatcatctaaagaatctccaacctactgaatataaaactattcaaggcattctgcacgaaattggtggaactggcatatttgtttttctctttgccagggttgttgaactcagtagctgtgaagaaactcaagcattagcactgcgagttatactctcattaattaaatacaaccaacaaagagtacatgaattagaaaattgtaatggactttctatgattcatcaggtgttgatcaaacaaaaatgcattgttgggttttacattttgaagacccttcttgaaggatgctgtggtgaagatattatttatatgaatgagaatggagagtttaagttggatgtagactctaatgctataatccaagatgttaagctgttagaggaactattgcttgactggaagatatggagtaaagcagaggcatgtgtttgggaaactttgctagcagctctagaagtcctcatcagagcagatcaccaccagcagatgtttaatattaagcagttattgaaagctcaagtggttcatcactttctactgacttgtcaggttttgcaggaatacaaagaggggcaactcacacccatgccccgagagatggcaagatctttcaggagaaagtgcggtcaatcatgtacc

SEQ ID NO: 3215 - protein, 1989 aa, Homo sapiens
MSTDSNSLAREFLTDVNRLCNAVVQRVEAREEEEEETHMATLGQYLVHGRGFLLLTKLNSIIDQALTCREELLTLLLSLLPLVWKIPVQEEKATDFNLPLSADIILTKEKNSSSQRSTQEKLHLEGSALSSQVSAKVNVFRKSRRQRKITYSVRDARKTQLSTSDSEANSDEKGIAMNKHRRPHLLHHFLTSFPKQDHPKAKLDRLATKEQTPPDAMALENSREIIPRQGSNTDILSEPAALSVISNMNNSPFDLCHVLLSLLEKVCKFDVTLNHNSPLAASVVPTLTEFLAGFGDCCSLSDNLESRVVSAGWTEEPVIQRMLFRTVLHLLSVDVSTAEMMPENLRKNLTELLRAALKIRICLEKQPDPFAPRQKKTLQEVQEDFVFSKYRHRALLLPELLEGVLQILICCLQSANPFYFSQAMDLVQEFIQHHGFNLFETAVLQMEWLVLRDGVPPEASEHLKALINSVMKIMSTVKKVKSEQLHHSMCTRKRHRRCEYSHFMHHHRDLSGLLVSAFKNQVSKNPFEETADGDVYYPERCCCIAVCAHQCLRLLQQASLSSTCVQILSGVHNIGICCCMDPKSVIIPLLHAFKLPALKNFQQHILNILNKLILDQLGGAEISPKIKKAACNICTVDSDQLAQLEETLQGNLCDAELSSSLSSPSYRFQGILPSSGSEDLLWKWDALKAYQNFVFEEDRLHSIQIANHICNLIQKGNIVVQWKLYNYIFNPVLQRGVELAHHCQHLSVTSAQSHVCSHHNQCLPQDVLQIYVKTLPILLKSRVIRDLFLSCNGVSQIIELNCLNGIRSHSLKAFETLIISLGEQQKDASVPDIDGIDIEQKELSSVHVGTSFHHQQAYSDSPQSLSKFYAGLKEAYPKRRKTVNQDVHINTINLFLCVAFLCVSKEAESDRESANDSEDTSGYDSTASEPLSHMLPCISLESLVLPSPEHMHQAADIWSMCRWIYMLSSVFQKQFYRLGGFRVCHKLIFMIIQKLFRSHKEEQGKKEGDTSVNENQDLNRISQPKRTMKEDLLSLAIKSDPIPSELGSLKKSADSLGKLELQHSINVEEVSATEAAPEEAKLFTSQESETSLQSIRLLEALLAICLHGARTSQQKMELELPNQNLSVESILFEMRDHLSQSKVIETQLAKPLFDALLRVGNYSADFEHNDAMTEKSHQSAEELSSQPGDFSEEAEDSQCCSFKLLVEEEGYEADSESNPEDGETQDDGVDLKSETEGFSASSSPNDLLENLTQGEIIYPEICMLELNLLSASKAKLDVLAHVFESFLKIIRQKEKNVFLLMQQGTVKNLLGGFLSILTQDDSDFQACQRVLVDLLVSLMSSRTCSEELTLLLRIFLEKSPCTKILLLGILKIIESDTTMSPSQYLTFPLLHAPNLSNGVSSQKYPGILNSKAMGLLRRARVSRSKKEADRESFPHRLLSSWHIAPVHLPLLGQNCWPHLSEGFSVSLWFNVECIHEAESTTEKGKKIKKRNKSLILPDSSFDGTESDRPEGAEYINPGERLIEEGCIHIISLGSKALMIQVWADPHNATLIFRVCMDSNDDMKAVLLAQVESQENIFLPSKWQHLVLTYLQQPQGKRRIHGKISIWVSGQRKPDVTLDFMLPRKTSLSSDSNKTFCMIGHCLSSQEEFLQLAGKWDLGNLLLFNGAKVGSQEAFYLYACGPNHTSVMPCKYGKPVNDYSKYINKEILRCEQIRELFMTKKDVDIGLLIESLSVVYTTYCPAQYTIYEPVIRLKGQMKTQLSQRPFSSKEVQSILLEPHHLKNLQPTEYKTIQGILHEIGGTGIFVFLFARVVELSSCEETQALRVILSLIKYNQQRVHELENCNGLSMIHQVLIKQKCIVGFYILKTLLEGCCGEDIIYMNENGEFKLDVDSNAIIQDVKLLEELLLDWKIWSKAEACVWETLLAALEVLIRADHHQQMFNIKQLLKAQVVHHFLLTCQVLQEYKEGQLTPMPREMARSFRRKCGQSCT

SEQ ID NO: 3216 - DNA, 13905 bp, Homo sapiens
tgatacaagcgtggccacctgccaaagagccagagggagagagggccactcgccttcctggtgacacagagatttcctagccccgttaccaaacgaaaaagcaacgcaagggcttctaagaagccatcccaatgaccttttggctttgagaagagcagtcctcataccagagtgtttggggttttggcctctttcagtgtttattcattcttacgtgggaaagttgtattccgaggtttctgtggtgcatgaagcttttgccttcaccatctgttcccgtgtcttcctcgggtgacatcagagtacagcagtattttcccttgccatctaatggggtttgggctgtttgactcaaccgtgtgtgttcctcaatgccaggggaataatcctaccctaagtcagctgaacagaagccaggatctaactgcaaacaagagacccagcttgcttaacagcatggaagagaccagtttcgttgcagctacctgggaagacggttgctaattagcctgcaacaaagagttccttgctcatctaaaagaggcaatcaccgttcaggtgaagctttgttctaagaatatttgtttcatctagtttatgagtccaaatgatatagactgtaaatgtcacagcagtggtgaaagactgctcggtcatgagcaccgacagtaactcactggcacgtgaatttctgaccgatgtcaaccggctttgcaatgcagtggtccagagggtggaggccagggaggaagaagaggaggagacgcacatggcaacccttggacagtaccttgtccatggtcgaggatttctattacttaccaagctaaattctataattgatcaggcattgacatgtagagaagaactcctgactcttcttctgtctctccttccactggtatggaagatacctgtccaagaagaaaaggcaacagattttaacctaccgctctcagcagatataatcctgaccaaagaaaagaactcaagttcacaaagatccactcaggaaaaattacatttagaaggaagtgccctgtctagtcaggtttctgcaaaagtaaatgtttttcgaaaaagcagacgacagcgtaaaattacccatcgctattctgtaagagatgcaagaaagacacagctctccacctcagattcagaagccaattcagatgaaaaaggcatagcaatgaataagcatagaaggccccatctgctgcatcattttttaacatcgtttcctaaacaagaccaccccaaagctaaacttgaccgcttagcaaccaaagaacagactcctccagatgctatggctttggaaaattccagagagattattccaagacaggggtcaaacactgacattttaagtgagccagctgccttgtctgttatcagtaacatgaacaattctccatttgacttatgtcatgttttgttatctttattagaaaaagtttgtaagtttgacgttaccttgaatcataattctcctttagcagccagtgtagtgcccacactaactgaattcctagcaggctttggggactgctgcagtctgagcgacaacttggagagtcgagtagtttctgcaggttggaccgaagaaccggtggctttgattcaaaggatgctctttcgaacagtgttgcatcttctgtcagtagatgttagtactgcagagatgatgccagaaaatcttaggaaaaatttaactgaattgcttagagcagctttaaaaattagaatatgcctagaaaagcagcctgacccttttgcaccaagacaaaagaaaacactgcaggaggttcaggaagattttgtgttttcaaagtatcgtcatagagcccttcttttacctgagcttttggaaggagttcttcagattctgatctgttgtcttcaaagtgcagcttcaaatcccttctacttcagtcaagccatggatttggttcaagaattcattcagcatcatggatttaatttatttgaaacagcagttcttcaaatggaatggctggttttaagagatggagttcctcccgaggcctcagagcatttgaaagccctaataaatagtgtgatgaaaataatgagcactgtcaaaaaagtgaaatcagagcaacttcatcattcgatgtgtacaagaaaaaggcacagacgatgtgaatattctcattttatgcatcatcaccgagatctctcaggtcttctggtttcggcttttaaaaaccaggtttccaaaaacccatttgaagagactgcagatggagatgtttattatcctgagcggtgctgttgcattgcagtgtgtgcccatcagtgcttgcgcttactacagcaggcttccttgagcagcacttgtgtccagatcctatcgggtgttcataacattggaatatgctgttgtatggatcccaaatctgtaatcattcctttgctccatgcttttaaattgccagcactgaaaaattttcagcagcatatattgaatatccttaacaaacttattttggatcagttaggaggagcagagatatcaccaaaaattaaaaaagcagcttgtaatatttgtactgttgactctgaccaactagcccaattagaagagacactgcagggaaacttatgtgatgctgaactctcctcaagtttatccagtccttcttacagatttcaagggatcctgcccagcagtggatctgaagatttgttgtggaaatgggatgctttaaaggcttatcagaactttgtttttgaagaagacagattacatagtatacagattgcaaatcacatttgcaatttaatccagaaaggcaatatagttgttcagtggaaattatataattacatatttaatcctgtgctccaaagaggagttgaattagcacatcattgtcaacacctaagcgttacttcagctcaaagtcatgtatgtagccatcataaccagtgcttgcctcaggacgtgcttcagatttatgtaaaaactctgcctatcctgcttaaatccagggtaataagagatttgtttttgagttgtaatggagtaagtcaaataatcgaattaaattgcttaaatggtattcgaagtcattctctaaaagcatttgaaactctgataatcagcctaggggagcaacagaaagatgcctcagttccagatattgatgggatagacattgaacagaaggagttgtcctctgtacatgtgggtacttcttttcatcatcagcaagcttattcagattctcctcagagtctcagcaaattttatgctggcctcaaagaagcttatccaaagagacggaagactgttaaccaagatgttcatatcaacacaataaacctattcctctgtgtggcttttttatgcgtaagtaaagaagcagagtctgacagggagtcggccaatgactcagaagatacttctggctatgacagcacagccagcgagcctttaagtcatatgctgccatgtatatctctcgagagccttgtcttgccttctcctgaacatatgcaccaagcagcagacatttggtctatgtgtcgttggatctacatgttgagttcagtgttccagaaacagttttataggcttggtggtttccgagtatgccataagttaatatttatgataatacagaaactgttcagaagtcacaaagaggagcaaggaaaaaaggagggagatacaagtgtaaatgaaaaccaggatttaaacagaatttctcaacctaagagaactatgaaggaagatttattatctttggctataaaaagtgaccccataccatcagaactaggtagtctaaaaaagagtgctgacagtttaggtaaattagagttacagcatatttcttccataaatgtggaagaagtttcagctactgaagccgctcccgaggaagcaaagctatttacaagtcaagaaagtgagacctcacttcaaagtatacgacttttggaagcccttctggccatttgtcttcatggtgccagaactagtcaacagaagatggaattggagttacctaatcagaacttgtctgtggaaagtatattatttgaaatgagggaccatctttcccagtcaaaggtgattgaaacacaactagcaaagcctttatttgatgccctgcttcgagttgccctcgggaattattcagcagattttgaacataatgatgctatgactgagaagagtcatcaatctgcagaagaattgtcatcccagcctggtgatttttcagaagaagctgaggattctcagtgttgtagttttaaacttttagttgaagaagaaggttacgaagcagatagtgaaagcaatcctgaagatggcgaaacccaggatgatggggtagacttaaagtctgaaacagaaggtttcagtgcatcaagcagtccaaatgacttactcgaaaacctcactcaaggggaaataatttatcctgagatttgtatgctggaattaaatttgctttctgctagtaaagccaaacttgatgtgcttgcccatgtatttgagagttttttgaaaattattaggcagaaagaaaagaatgtttttctgctcatgcaacagggaactgtgaaaaatcttttaggagggttcttgagtattttaacacaggatgattctgattttcaagcatgccagagagtattggtggatcttttggtatctttgatgagttcaagaacatgttcagaagagctaacccttcttttgagaatatttctggagaaatctccttgtacaaaaattcttcttctgggtattctgaaaattattgaaagtgatactactatgagcccttcacagtatctaaccttccctttactgcacgctccaaatttaagcaacggtgtttcatcacaaaagtatcctgggattttaaacagtaaggccatgggtttattgagaagagcacgagtttcacggagcaagaaagaggctgatagagagagttttccccatcggctgctttcatcttggcacatagccccagtccacctgccgttgctggggcaaaactgctggccacacctatcagaaggtttcagtgtttccctgtggtttaatgtggagtgtatccatgaagctgagagtactacagaaaaaggaaagaagataaagaaaagaaacaaatcattaattttaccagatagcagttttgatggtacagagagcgacagaccagaaggtgcagagtacataaatcctggtgaaagactcatagaagaaggatgtattcatataatttcactgggatccaaagcgttgatgatccaagtgtgggctgatccccacaatgccactcttatctttcgtgtgtgcatggattcaaatgatgacatgaaagctgttttactagcacaggttgaatcacaggagaatattttcctcccaagcaaatggcaacatttagtactcacctacttacagcagccccaagggaaaaggaggattcatgggaaaatctccatatgggtctctggacagaggaagcctgatgttactttggattttatgcttccaagaaaaacaagtttgtcatctgatagcaataaaacattttgcatgattggccattgtttatcatcccaagaagagtttttgcagttggctggaaaatgggacctgggaaatttgcttctcttcaacggagctaaggttggttcacaagaggccttttatctgtatgcttgtggacccaaccatacatctgtaatgccatgtaagtatggcaagccagtcaatgactactccaaatatattaataaagaaattttgcgatgtgaacaaatcagagaactttttatgaccaagaaagatgtggatattggtctcttaattgaaagtctttcagttgtttatacaacttactgtcctgctcagtataccatctatgaaccagtgattagacttaaaggtcaaatgaaaacccaactctctcaaagacccttcagctcaaaagaagttcagagcatcttattagaacctcatcatctaaagaatctccaacctactgaatataaaactattcaaggcattctgcacgaaattggtggaactggcatatttgtttttctctttgccagggttgttgaactcagtagctgtgaagaaactcaagcattagcactgcgagttatactctcattaattaaatacaaccaacaaagagtacatgaattagaaaattgtaatggactttctatgattcatcaggtgttgatcaaacaaaaatgcattgttgggttttacattttgaagacccttcttgaaggatgctgtggtgaagatattatttatatgaatgagaatggagagtttaagttggatgtagactctaatgctataatccaagatgttaagctgttagaggaactattgcttgactggaagatatggagtaaagcagaggcatgtgtttgggaaactttgctagcagctctagaagtcctcatcagagcagatcaccaccagcagatgtttaatattaagcagttattgaaagctcaagtggttcatcactttctactgacttgtcaggttttgcaggaatacaaagaggggcaactcacacccatgccccgagaggtttgtagatcatttgtgaaaattatagcagaagtccttggatctcctccagatttggaattattgacaattatcttcaatttccttttagcagttcaccctcctactaatacttacgtttgtcacaatcccacgaacttctacttttctttgcacatagatggcaagatctttcaggagaaagtgcggtcaatcatgtacctgaggcattccagcagtggaggaaggtcccttatgagccctggatttatggtaataagcccatctggttttactgcttcaccatatgaaggagagaattcctctaatattattccacaacagatggccgcccatatgctgcgttctagaagcctaccagcattccctacttcttcactactaacgcaatcacaaaaactgactggaagtttgggttgtagtatcgacaggttacaaaatattgcagatacttatgttgccacccaatcaaagaaacaaaattctttggggagttccgacacactgaaaaaaggcaaagaggacgcattcatcagtagctgtgagtctgcaaaaactgtttgtgaaatggaagctgtcctctcagcccaggtctctgtcagtgatgtcccaaagggagtgctgggatttccagtggtcaaagcagatcataaacagttgggagcagaacccaggtcagaagatgacagtcctggggatgagtcctgcccacgccgacctgattacctaaagggattggcctccttccagcgaagccacagcactattgcaagccttgggctagcttttccttcacagaacggatctgcagctgttggccgttggccaagtcttgttgatagaaacactgatgattgggaaaactttgcctattctcttggttatgagccaaattacaaccgaactgcaagtgctcacagtgtaactgaagactgtttggtacctatatgctgtggattatatgaactcctaagtggggttcttcttatcctgcctgatgttttgcttgaagatgtgatggacaagcttattcaagcagatacacttttggtcctcgttaaccacccatcaccagctatacaacaaggtgttattaaactattagatgcatattttgctagagcatctaaggaacaaaaagataaatttctgaagaatcgtggattttccttgctagccaaccagttgtatcttcatcgaggaactcaagaattgttagaatgcttcatcgaaatgttctttggtcgacatattggccttgatgaagaatttgatctggaagatgtgagaaacatgggattgtttcagaagtggtctgtcattcctattctgggactaatagagacctctctatatgacaacatactcttgcataatgctcttttacttcttctccaaattttaaattcttgttctaaggtagcagatatgttgctggataatggtctactctatgtgttatgtaatacagtagcagccctgaatggattagaaaagaacattcccatgagtgaatataaattgcttgcttgtgatatacagcaacttttcatagcagttacaattcatgcttgcagttcctcaggctcacaatattttagggttattgaagaccttattgtaatgcttggatatcttcaaaatagcaaaaacaagaggacacaaaatatggctgttgcactacagcttagagttctccaggctgctatggaatttataaggaccaccgcaaatcatgactctgaaaacctcacagattcactccagtcaccttctgctccccatcatgcagtagttcaaaagcggaaaagcattgctggcgagtcctcgaaaatttccccttgctcaaactgaatcgcttctgatgaaaatgcgttcagtggcaaatgatgagcttcatgtgatgatgcaacggagaatgagccaagagaaccctagccaagcaactgaaacggaacttgcgcagagactacagaggctcactgttttagcagtcaacaggattatttatcaagaatttaattcagacattattgacattttgagaactccagaaaatgtaactcaaagcaagacctcagttttccagaccgaaatttctgaggaaaatattcatcatgaacagtcttctgttttcaatccatttcagaaagaaatttttacatatctggtagaaggattcaaagtatctattggttcaagtaaagccagtggttccaagcagcaatggactaaaattctgtggtcttgtaaggagaccttccgaatgcagcttgggagactactagtgcatattttgtcgccagcccacgctgcacaagagagaaagcaaatttttgaaatagttcatgaaccaaatcatcaggaaatactacgagactgtctcagcccatccctacaacatggagccaagttagttttgtatttgtcagagttgatacataatcaccaaggtgaattgactgaagaagagctaggcacagcagaactgcttatgaatgctttgaagttatgtggtcacaagtgcatccctcccagtgcatcaacaaaagcagaccttattaaaatgatcaaagaggaacaaaagaaatatgaaactgaagaaggagtgaataaagctgcttggcagaaaacagttaacaataatcaacaaagtctctttcagcgtctggattcaaaatcaaaggatatatctaaaatagctgcagatatcacccaggcagtgtctctctcccaaggaaatgagagaaaaaaggtgatccagcatattagaggaatgtataaagtagatttgagtgccagcagacattggcaggaacttattcagcagctgacacatgatagagcagtatggtatgaccccatctactatccaacctcatggcagttggatccaacagaagggccaaatcgagagaggagacgtttacagagatgttatttaactattccaaataagtatctccttagggatagacagaaatcagaagatgttgtcaaaccaccactctcttacctgtttgaagacaaaactcattcttctttctcttctactgtcaaagacaaagctgcaagtgaatctataagagtgaatcgaagatgcatcagtgttgcaccatctagagagacagctggtgaattgttactaggtaaatgtggaatgtattttgtggaagataatgcttctgatacagttgaaagttcgagccttcagggagagttggaaccagcatcattttcctggacatatgaagaaattaaagaagttcacaagcgttggtggcaattgagagataatgctgtagaaatctttctaacaaatggcagaacactcctgttggcatttgataacaccaaggttcgtgatgatgtataccacaatatactcacaaataacctccctaatcttctggaatatggtaacatcaccgctctgacaaatttatggtatactgggcaaattactaattttgaatatttgactcacttaaacaaacatgctggccgatccttcaatgatctcatgcagtatcctgtgttcccatttatacttgctgactacgttagtgagacacttgacctcaatgatctgttgatatacagaaatctctctaaacctatagctgttcagtataaagaaaaagaagatcgttatgtggacacatacaagtacttggaggaagagtaccgcaaaggagccagagaagatgaccccatgcctcccgtgcagccctatcactatggctcccactattccaatagcggcactgtgcttcacttcctggtcaggatgcctcctttcactaaaatgtttttagcctatcaagatcaaagttttgacattccagacagaacttttcattctacaaatacaacttggcgactctcatcttttgaatctatgactgatgtgaaagaacttatcccagagtttttctatcttccagagttcctagttaaccgtgaaggttttgattttggtgtgcgtcagaatggtgaacgggttaatcacgtcaaccttcccccttgggcgcgtaatgatcctcgtctttttatcctcatccatcggcaggctctagagtctgactacgtgtcgcagaacatctgtcagtggattgacttggtgtttgggtataagcaaaaggggaaggcttctgttcaagcgatcaatgtttttcatcctgctacatattttggaatggatgtctctgcagttgaagatccagttcagagacgagcgctagaaaccatgataaaaacctacgggcagactccccgtcagctgttccacatggcccatgtgagcagacctggagccaagctcaatattgaaggagagcttccagctgctgtggggttgctagtgcagtttgctttcagggagacccgagaacaggtcaaagaaatcacctatccgagtcctttgtcatggataaaaggcttgaaatggggggaatacgtgggttcccccagtgctccagtacctgtggtctgcttcagccagccccacggagaaagatttggctctctccaggctctgcccaccagagcaatctgtggtttgtcacggaatttctgtcttctgatgacatatagcaaggaacaaggtgtgagaagcatgaacagtacggacattcagtggtcagccatcctgagctggggatatgctgataatattttaaggttgaagagtaaacaaagtgagcctccagtaaactttattcaaagttcacaacagtaccaggtgactagttgtgcttgggtgcctgacagttgccagctgtttactggaagcaaatgcggtgtcatcacagcctacacaaacagatttacaagcagcacgccatcagaaatagaaatggagactcaaatacatctctatggtcacacagaagagataaccagcttatttgtttgcaaaccatacagtatactgataagtgtgagcagagacggaacctgcatcatatgggatttaaacaggttatgctatgtacaaagtctggcgggacacaaaagccctgtcacagctgtctctgccagtgaaacctcaggtgatattgctactgtgtgtgattcagctggcggaggcagtgacctcagactctggacggtgaacggggatctcgttggacatgtccactgcagggagatcatctgttccgtggctttctccaaccagcctgagggagtatctatcaatgtaatcgctgggggattagaaaatggaattgtaaggttatggagcacatgggacttaaagcctgtgagagaaattacatttcccaaatcaaataagcccatcatcagccttacattttcttgtgatggccaccatttgtacacagcaaacagtgatgggaccgtgattgcctggtgtcggaaggaccagcagcgcttgaaacagccaatgttctattccttccttagcagctatgcagccgggtgaatgcgaatgaacttcacgttctccaaagcactttaactccaaactagatttgttgacttcaccagttttaggaggttgaacctaaagaaatggatgactggacaaaccatccaaataatgataaagtctattcatctgcacaaaattctgaagagtcacatgatcctaagaggaaagttctgttctattttagtgataatctggaagattgtgtcaatatgcactagccaacaagttttaagcctcgcatggtacattaaaatgatattcttaaaattttttcccaccaaggtattccaaagaaaatattaaggtctcccctttttctatgattccaaaaggaccagtagaatttaaattggttggttgattgtttatataaaacacactaaaattatattttaaaagtttactgccatgaaatactcctcccaccacacacacatgctccaaaagaggaaagaaaaaaagataatttttaggacttgataattgctttctttgagaagcaaattattcagtaggtgcctctgtaccaaatattttatggaatatctaaatactaaaataaactatgaatgaatctcaaaattaggcagtttttgccagttgctttcttagctcaaaggagaaccagaatttttttgacagccacaaacaagaatacaggtatcttggatttcagacacattctgtttcttcataaaaattttacttaaaatctgtaacgctagatattgactatccttagttgagtcactgaggtttaaacacaatggtaagtcttaaagtctgctatttacagagcattgaatctgtaccaatttgcaatagaaagccttcagtatgcaagaagtttgcatgggtattaagaacacagcctaaataaggcatttgatctaatctgcaggaagaattttcttccccaaaacagaattataaaagcttactttaaacaggaggcagaataattcttttaggaaaccatttcattctgtttctactaacctataccatctgagaaattcctaaacatcttggagccgtctgtctctcccatatgatggctgtctgtatatttttacttggggtgctgctttattggctttgaaaacactgtcagataagctcagtaatatgttaccatgggataaaaatatgtatccctgcctaagaataacttgtgcatttgttatggaaatttaattcatatggtgtttacagtactacttttgtaacttccagactttctaaaacattctgcttaaaaaccatataaaatataattccaaagtctctgctgtcaagatagattcgagagaaagcacgtggccatgtatgctttaaccttaaactgcatacacatgtagtgatacctaggctgcatttagatcaccgtgtgctcaggccaggtgtgaatcctgaggtccatggaggtgcagagatgagattactcctattcacgttgaagtgatttgctttgttaacaaaaaattgcagctattgtctagctttcatttttttactgagaactttaaattagtcccctattagaatagggttgctactcatctttttttaaaaaccgaatttcatcatttatctaaagagaaaatatgcagaataactggtcttgttaagagtgcaatattatatttttatgtaaaaataaaaattaatttggggggattatttattcagcatgaaacctaatatgtatatgtttgaaatacttcataatgtgcatgttgtagcaaacatttctgtaaattatcacaagctctgttacctttatatacactgcctcttcaatttggaaataaatttcataaaaatagat

SEQ ID NO: 3217 - protein, 2586 aa, Homo sapiens
MSTDSNSLAREFLTDVNRLCNAVVQRVEAREEEEEETHMATLGQYLVHGRGFLLLTKLNSIIDQALTCREELLTLLLSLLPLVWKIPVQEEKATDFNLPLSADIILTKEKNSSSQRSTQEKLHLEGSALSSQVSAKVNVFRKSRRQRKITYSVRDARKTQLSTSDSEANSDEKGIAMNKHRRPHLLHHFLTSFPKQDHPKAKLDRLATKEQTPPDAMALENSREIIPRQGSNTDILSEPAALSVISNMNNSPFDLCHVLLSLLEKVCKFDVTLNHNSPLAASVVPTLTEFLAGFGDCCSLSDNLESRVVSAGWTEEPVIQRMLFRTVLHLLSVDVSTAEMMPENLRKNLTELLRAALKIRICLEKQPDPFAPRQKKTLQEVQEDFVFSKYRHRALLLPELLEGVLQILICCLQSANPFYFSQAMDLVQEFIQHHGFNLFETAVLQMEWLVLRDGVPPEASEHLKALINSVMKIMSTVKKVKSEQLHHSMCTRKRHRRCEYSHFMHHHRDLSGLLVSAFKNQVSKNPFEETADGDVYYPERCCCIAVCAHQCLRLLQQASLSSTCVQILSGVHNIGICCCMDPKSVIIPLLHAFKLPALKNFQQHILNILNKLILDQLGGAEISPKIKKAACNICTVDSDQLAQLEETLQGNLCDAELSSSLSSPSYRFQGILPSSGSEDLLWKWDALKAYQNFVFEEDRLHSIQIANHICNLIQKGNIVVQWKLYNYIFNPVLQRGVELAHHCQHLSVTSAQSHVCSHHNQCLPQDVLQIYVKTLPILLKSRVIRDLFLSCNGVSQIIELNCLNGIRSHSLKAFETLIISLGEQQKDASVPDIDGIDIEQKELSSVHVGTSFHHQQAYSDSPQSLSKFYAGLKEAYPKRRKTVNQDVHINTINLFLCVAFLCVSKEAESDRESANDSEDTSGYDSTASEPLSHMLPCISLESLVLPSPEHMHQAADIWSMCRWIYMLSSVFQKQFYRLGGFRVCHKLIFMIIQKLFRSHKEEQGKKEGDTSVNENQDLNRISQPKRTMKEDLLSLAIKSDPIPSELGSLKKSADSLGKLELQHSINVEEVSATEAAPEEAKLFTSQESETSLQSIRLLEALLAICLHGARTSQQKMELELPNQNLSVESILFEMRDHLSQSKVIETQLAKPLFDALLRVGNYSADFEHNDAMTEKSHQSAEELSSQPGDFSEEAEDSQCCSFKLLVEEEGYEADSESNPEDGETQDDGVDLKSETEGFSASSSPNDLLENLTQGEIIYPEICMLELNLLSASKAKLDVLAHVFESFLKIIRQKEKNVFLLMQQGTVKNLLGGFLSILTQDDSDFQACQRVLVDLLVSLMSSRTCSEELTLLLRIFLEKSPCTKILLLGILKIIESDTTMSPSQYLTFPLLHAPNLSNGVSSQKYPGILNSKAMGLLRRARVSRSKKEADRESFPHRLLSSWHIAPVHLPLLGQNCWPHLSEGFSVSLWFNVECIHEAESTTEKGKKIKKRNKSLILPDSSFDGTESDRPEGAEYINPGERLIEEGCIHIISLGSKALMIQVWADPHNATLIFRVCMDSNDDMKAVLLAQVESQENIFLPSKWQHLVLTYLQQPQGKRRIHGKISIWVSGQRKPDVTLDFMLPRKTSLSSDSNKTFCMIGHCLSSQEEFLQLAGKWDLGNLLLFNGAKVGSQEAFYLYACGPNHTSVMPCKYGKPVNDYSKYINKEILRCEQIRELFMTKKDVDIGLLIESLSVVYTTYCPAQYTIYEPVIRLKGQMKTQLSQRPFSSKEVQSILLEPHHLKNLQPTEYKTIQGILHEIGGTGIFVFLFARVVELSSCEETQALRVILSLIKYNQQRVHELENCNGLSMIHQVLIKQKCIVGFYILKTLLEGCCGEDIIYMNENGEFKLDVDSNAIIQDVKLLEELLLDWKIWSKAEACVWETLLAALEVLIRADHHQQMFNIKQLLKAQVVHHFLLTCQVLQEYKEGQLTPMPREVCRSFVKIIAEVLGSPPDLELLTIIFNFLLAVHPPTNTYVCHNPTNFYFSLHIDGKIFQEKVRSIMYLRHSSSGGRSLMSPGFMVISPSGFTDYEGENSSNIIPQQMAAHMLRSRSLPAFPTSSLLTQSQKLTGSLGCSIDRLQNIADTYVATQSKKQNSLGSSDTLKKGKEDAFISSCESAKTVCEMEAVLSAQVSVSDVPKGVLGFPVVKADHKQLGAEPRSEDDSPGDESCPRRPDYLKGLASFQRSHSTIASLGLAFPSQNGSAAVGRWPSLVDRNTDDWENFAYSLGYEPNYNRTASAHSVTEDCLVPICCGELLSGVLLILPDVLLEDVMDKLIQADTLLVLVNHPSPAIQQGVIKLLDAYFARASKEQKDKFLKNRGFSLLANQLYLHRGTQELLECFIEMFFGRHIGLDEEFDLEDVRNMGLFQKWSVIPILGLIETSLYDNILLHNALLLLLQILNSCSKVADMLLDNGLLYVLCNTVAALNGLEKNIPMSEYKLLACDIQQLFIAVTIHACSSSGSQYFRVIEDLIVMLGYLQNSKNKRTQNMAVQLRVLQAAMEFIRTTANHDSENLTDSLQSPSAPHHAVVQKRKSIAGESSKISPCSN

SEQ ID NO: 3218 - DNA, 13426 bp, Homo sapiens
gcgcggcggcggcggcagcggcgtcggctcggggttctccgggagagggggagtgcgcggcggccgcagctgccacaaaccaggtgaagctttgttctaagaatatttgtttcatctagtttatgagtccaaatgatatagactgtaaatgtcacagcagtggtgaaagactgctcggtcatgagcaccgacagtaactcactggcacgtgaatttctgaccgatgtcaaccggctttgcaatgcagtggtccagagggtggaggccagggaggaagaagaggaggagacgcacatggcaacccttggacagtaccttgtccatggtcgaggatttctattacttaccaagctaaattctataattgatcaggcattgacatgtagagaagaactcctgactcttcttctgtctctccttccactggtatggaagatacctgtccaagaagaaaaggcaacagattttaacctaccgctctcagcagatataatcctgaccaaagaaaagaactcaagttcacaaagatccactcaggaaaaattacatttagaaggaagtgccctgtctagtcaggtttctgcaaaagtaaatgtttttcgaaaaagcagacgacagcgtaaaattacccatcgctattctgtaagagatgcaagaaagacacagctctccacctcagattcagaagccaattcagatgaaaaaggcatagcaatgaataagcatagaaggccccatctgctgcatcattttttaacatcgtttcctaaacaagaccaccccaaagctaaacttgaccgcttagcaaccaaagaacagactcctccagatgctatggctttggaaaattccagagagattattccaagacaggggtcaaacactgacattttaagtgagccagctgccttgtctgttatcagtaacatgaacaattctccatttgacttatgtcatgttttgttatctttattagaaaaagtttgtaagtttgacgttaccttgaatcataattctcctttagcagccagtgtagtgcccacactaactgaattcctagcaggctttggggactgctgcagtctgagcgacaacttggagagtcgagtagtttctgcaggttggaccgaagaaccggtggctttgattcaaaggatgctctttcgaacagtgttgcatcttctgtcagtagatgttagtactgcagagatgatgccagaaaatcttaggaaaaatttaactgaattgcttagagcagctttaaaaattagaatatgcctagaaaagcagcctgacccttttgcaccaagacaaaagaaaacactgcaggaggttcaggaagattttgtgttttcaaagtatcgtcatagagcccttcttttacctgagcttttggaaggagttcttcagattctgatctgttgtcttcaaagtgcagcttcaaatcccttctacttcagtcaagccatggatttggttcaagaattcattcagcatcatggatttaatttatttgaaacagcagttcttcaaatggaatggctggttttaagagatggagttcctcccgaggcctcagagcatttgaaagccctaataaatagtgtgatgaaaataatgagcactgtcaaaaaagtgaaatcagagcaacttcatcattcgatgtgtacaagaaaaaggcacagacgatgtgaatattctcattttatgcatcatcaccgagatctctcaggtcttctggtttcggcttttaaaaaccaggtttccaaaaacccatttgaagagactgcagatggagatgtttattatcctgagcggtgctgttgcattgcagtgtgtgcccatcagtgcttgcgcttactacagcaggcttccttgagcagcacttgtgtccagatcctatcgggtgttcataacattggaatatgctgttgtatggatcccaaatctgtaatcattcctttgctccatgcttttaaattgccagcactgaaaaattttcagcagcatatattgaatatccttaacaaacttattttggatcagttaggaggagcagagatatcaccaaaaattaaaaaagcagcttgtaatatttgtactgttgactctgaccaactagcccaattagaagagacactgcagggaaacttatgtgatgctgaactctcctcaagtttatccagtccttcttacagatttcaagggatcctgcccagcagtggatctgaagatttgttgtggaaatgggatgctttaaaggcttatcagaactttgtttttgaagaagacagattacatagtatacagattgcaaatcacatttgcaatttaatccagaaaggcaatatagttgttcagtggaaattatataattacatatttaatcctgtgctccaaagaggagttgaattagcacatcattgtcaacacctaagcgttacttcagctcaaagtcatgtatgtagccatcataaccagtgcttgcctcaggacgtgcttcagatttatgtaaaaactctgcctatcctgcttaaatccagggtaataagagatttgtttttgagttgtaatggagtaagtcaaataatcgaattaaattgcttaaatggtattcgaagtcattctctaaaagcatttgaaactctgataatcagcctaggggagcaacagaaagatgcctcagttccagatattgatgggatagacattgaacagaaggagttgtcctctgtacatgtgggtacttcttttcatcatcagcaagcttattcagattctcctcagagtctcagcaaattttatgctggcctcaaagaagcttatccaaagagacggaagactgttaaccaagatgttcatatcaacacaataaacctattcctctgtgtggcttttttatgcgtaagtaaagaagcagagtctgacagggagtcggccaatgactcagaagatacttctggctatgacagcacagccagcgagcctttaagtcatatgctgccatgtatatctctcgagagccttgtcttgccttctcctgaacatatgcaccaagcagcagacatttggtctatgtgtcgttggatctacatgttgagttcagtgttccagaaacagttttataggcttggtggtttccgagtatgccataagttaatatttatgataatacagaaactgttcagaagtcacaaagaggagcaaggaaaaaaggagggagatacaagtgtaaatgaaaaccaggatttaaacagaatttctcaacctaagagaactatgaaggaagatttattatctttggctataaaaagtgaccccataccatcagaactaggtagtctaaaaaagagtgctgacagtttaggtaaattagagttacagcatatttcttccataaatgtggaagaagtttcagctactgaagccgctcccgaggaagcaaagctatttacaagtcaagaaagtgagacctcacttcaaagtatacgacttttggaagcccttctggccatttgtcttcatggtgccagaactagtcaacagaagatggaattggagttacctaatcagaacttgtctgtggaaagtatattatttgaaatgagggaccatctttcccagtcaaaggtgattgaaacacaactagcaaagcctttatttgatgccctgcttcgagttgccctcgggaattattcagcagattttgaacataatgatgctatgactgagaagagtcatcaatctgcagaagaattgtcatcccagcctggtgatttttcagaagaagctgaggattctcagtgttgtagttttaaacttttagttgaagaagaaggttacgaagcagatagtgaaagcaatcctgaagatggcgaaacccaggatgatggggtagacttaaagtctgaaacagaaggtttcagtgcatcaagcagtccaaatgacttactcgaaaacctcactcaaggggaaataatttatcctgagatttgtatgctggaattaaatttgctttctgctagtaaagccaaacttgatgtgcttgcccatgtatttgagagttttttgaaaattattaggcagaaagaaaagaatgtttttctgctcatgcaacagggaactgtgaaaaatcttttaggagggttcttgagtattttaacacaggatgattctgattttcaagcatgccagagagtattggtggatcttttggtatctttgatgagttcaagaacatgttcagaagagctaacccttcttttgagaatatttctggagaaatctccttgtacaaaaattcttcttctgggtattctgaaaattattgaaagtgatactactatgagcccttcacagtatctaaccttccctttactgcacgctccaaatttaagcaacggtgtttcatcacaaaagtatcctgggattttaaacagtaaggccatgggtttattgagaagagcacgagtttcacggagcaagaaagaggctgatagagagagttttccccatcggctgctttcatcttggcacatagccccagtccacctgccgttgctggggcaaaactgctggccacacctatcagaaggtttcagtgtttccctgtggtttaatgtggagtgtatccatgaagctgagagtactacagaaaaaggaaagaagataaagaaaagaaacaaatcattaattttaccagatagcagttttgatggtacagagagcgacagaccagaaggtgcagagtacataaatcctggtgaaagactcatagaagaaggatgtattcatataatttcactgggatccaaagcgttgatgatccaagtgtgggctgatccccacaatgccactcttatctttcgtgtgtgcatggattcaaatgatgacatgaaagctgttttactagcacaggttgaatcacaggagaatattttcctcccaagcaaatggcaacatttagtactcacctacttacagcagccccaagggaaaaggaggattcatgggaaaatctccatatgggtctctggacagaggaagcctgatgttactttggattttatgcttccaagaaaaacaagtttgtcatctgatagcaataaaacattttgcatgattggccattgtttatcatcccaagaagagtttttgcagttggctggaaaatgggacctgggaaatttgcttctcttcaacggagctaaggttggttcacaagaggccttttatctgtatgcttgtggacccaaccatacatctgtaatgccatgtaagtatggcaagccagtcaatgactactccaaatatattaataaagaaattttgcgatgtgaacaaatcagagaactttttatgaccaagaaagatgtggatattggtctcttaattgaaagtctttcagttgtttatacaacttactgtcctgctcagtataccatctatgaaccagtgattagacttaaaggtcaaatgaaaacccaactctctcaaagacccttcagctcaaaagaagttcagagcatcttattagaacctcatcatctaaagaatctccaacctactgaatataaaactattcaaggcattctgcacgaaattggtggaactggcatatttgtttttctctttgccagggttgttgaactcagtagctgtgaagaaactcaagcattagcactgcgagttatactctcattaattaaatacaaccaacaaagagtacatgaattagaaaattgtaatggactttctatgattcatcaggtgttgatcaaacaaaaatgcattgttgggttttacattttgaagacccttcttgaaggatgctgtggtgaagatattatttatatgaatgagaatggagagtttaagttggatgtagactctaatgctataatccaagatgttaagctgttagaggaactattgcttgactggaagatatggagtaaagcagagcaaggtgtttgggaaactttgctagcagctctagaagtcctcatcagagcagatcaccaccagcagatgtttaatattaagcagttattgaaagctcaagtggttcatcactttctactgacttgtcaggttttgcaggaatacaaagaggggcaactcacacccatgccccgagaggtttgtagatcatttgtgaaaattatagcagaagtccttggatctcctccagatttggaattattgacaattatcttcaatttccttttagcagttcaccctcctactaatacttacgtttgtcacaatcccacgaacttctacttttctttgcacatagatggcaagatctttcaggagaaagtgcggtcaatcatgtacctgaggcattccagcagtggaggaaggtcccttatgagccctggatttatggtaataagcccatctggttttactgcttcaccatatgaaggagagaattcctctaatattattccacaacagatggccgcccatatgctgcgttctagaagcctaccagcattccctacttcttcactactaacgcaatcacaaaaactgactggaagtttgggttgtagtatcgacaggttacaaaatattgcagatacttatgttgccacccaatcaaagaaacaaaattctttggggagttccgacacactgaaaaaaggcaaagaggacgcattcatcagtagctgtgagtctgcaaaaactgtttgtgaaatggaagctgtcctctcagcccaggtctctgtcagtgatgtcccaaagggagtgctgggatttccagtggtcaaagcagatcataaacagttgggagcagaacccaggtcagaagatgacagtcctggggatgagtcctgcccacgccgacctgattacctaaagggattggcctccttccagcgaagccacagcactattgcaagccttgggctagcttttccttcacagaacggatctgcagctgttggccgttggccaagtcttgttgatagaaacactgatgattgggaaaactttgcctattctcttggttatgagccaaattacaaccgaactgcaagtgctcacagtgtaactgaagactgtttggtacctatatgctgtggattatatgaactcctaagtggggttcttcttatcctgcctgatgttttgcttgaagatgtgatggacaagcttattcaagcagatacacttttggtcctcgttaaccacccatcaccagctatacaacaaggtgttattaaactattagatgcatattttgctagagcatctaaggaacaaaaagataaatttctgaagaatcgtggattttccttgctagccaaccagttgtatcttcatcgaggaactcaagaattgttagaatgcttcatcgaaatgttctttggtcgacatattggccttgatgaagaatttgatctggaagatgtgagaaacatgggattgtttcagaagtggtctgtcattcctattctgggactaatagagacctctctatatgacaacatactcttgcataatgctcttttacttcttctccaaattttaaattcttgttctaaggtagcagatatgttgctggataatggtctactctatgtgttatgtaatacagtagcagccctgaatggattagaaaagaacattcccatgagtgaatataaattgcttgcttgtgatatacagcaacttttcatagcagttacaattcatgcttgcagttcctcaggctcacaatattttagggttattgaagaccttattgtaatgcttggatatcttcaaaatagcaaaaacaagaggacacaaaatatggctgttgcactacagcttagagttctccaggctgctatggaatttataaggaccaccgcaaatcatgactctgaaaacctcacagattcactccagtcaccttctgctccccatcatgcagtagttcaaaagcggaaaagcattgctggtcctcgaaaatttccccttgctcaaactgaatcgcttctgatgaaaatgcgttcagtggcaaatgatgagcttcatgtgatgatgcaacggagaatgagccaagagaaccctagccaagcaactgaaacggaacttgcgcagagactacagaggctcactgttttagcagtcaacaggattatttatcaagaatttaattcagacattattgacattttgagaactccagaaaatgtaactcaaagcaagacctcagttttccagaccgaaatttctgaggaaaatattcatcatgaacagtcttctgttttcaatccatttcagaaagaaatttttacatatctggtagaaggattcaaagtatctattggttcaagtaaagccagtggttccaagcagcaatggactaaaattctgtggtcttgtaaggagaccttccgaatgcagcttgggagactactagtgcatattttgtcgccagcccacgctgcacaagagagaaagcaaatttttgaaatagttcatgaaccaaatcatcaggaaatactacgagactgtctcagcccatccctacaacatggagccaagttagttttgtatttgtcagagttgatacataatcaccaaggtgaattgactgaagaagagctaggcacagcagaactgcttatgaatgctttgaagttatgtggtcacaagtgcatccctcccagtgcatcaacaaaagcagaccttattaaaatgatcaaagaggaacaaaagaaatatgaaactgaagaaggagtgaataaagctgcttggcagaaaacagttaacaataatcaacaaagtctctttcagcgtctggattcaaaatcaaaggatatatctaaaatagctgcagatatcacccaggcagtgtctctctcccaaggaaatgagagaaaaaaggtgatccagcatattagaggaatgtataaagtagatttgagtgccagcagacattggcaggaacttattcagcagctgacacatgatagagcagtatggtatgaccccatctactatccaacctcatggcagttggatccaacagaagggccaaatcgagagaggagacgtttacagagatgttatttaactattccaaataagtatctccttagggatagacagaaatcagaagatgttgtcaaaccaccactctcttacctgtttgaagacaaaactcattcttctttctcttctactgtcaaagacaaagctgcaagtgaatctataagagtgaatcgaagatgcatcagtgttgcaccatctagagagacagctggtgaattgttactaggtaaatgtggaatgtattttgtggaagataatgcttctgatacagttgaaagttcgagccttcagggagagttggaaccagcatcattttcctggacatatgaagaaattaaagaagttcacaagcgttggtggcaattgagagataatgctgtagaaatctttctaacaaatggcagaacactcctgttggcatttgataacaccaaggttcgtgatgatgtataccacaatatactcacaaataacctccctaatcttctggaatatggtaacatcaccgctctgacaaatttatggtatactgggcaaattactaattttgaatatttgactcacttaaacaaacatgctggccgatccttcaatgatctcatgcagtatcctgtgttcccatttatacttgctgactacgttagtgagacacttgacctcaatgatctgttgatatacagaaatctctctaaacctatagctgttcagtataaagaaaaagaagatcgttatgtggacacatacaagtacttggaggaagagtaccgcaaaggagccagagaagatgaccccatgcctcccgtgcagccctatcactatggctcccactattccaatagcggcactgtgcttcacttcctggtcaggatgcctcctttcactaaaatgtttttagcctatcaagatcaaagttttgacattccagacagaacttttcattctacaaatacaacttggcgactctcatcttttgaatctatgactgatgtgaaagaacttatcccagagtttttctatcttccagagttcctagttaaccgtgaaggttttgattttggtgtgcgtcagaatggtgaacgggttaatcacgtcaaccttcccccttgggcgcgtaatgatcctcgtctttttatcctcatccatcggcaggctctagagtctgactacgtgtcgcagaacatctgtcagtggattgacttggtgtttgggtataagcaaaaggggaaggcttctgttcaagcgatcaatgtttttcatcctgctacatattttggaatggatgtctctgcagttgaagatccagttcagagacgagcgctagaaaccatgataaaaacctacgggcagactccccgtcagctgttccacatggcccatgtgagcagacctggagccaagctcaatattgaaggagagcttccagctgctgtggggttgctagtgcagtttgctttcagggagacccgagaacaggtcaaagaaatcacctatccgagtcctttgtcatggataaaaggcttgaaatggggggaatacgtgggttcccccagtgctccagtacctgtggtctgcttcagccagccccacggagaaagatttggctctctccaggctctgcccaccagagcaatctgtggtttgtcacggaatttctgtcttctgatgacatatagcaaggaacaaggtgtgagaagcatgaacagtacggacattcagtggtcagccatcctgagctggggatatgctgataatattttaaggttgaagagtaaacaaagtgagcctccagtaaactttattcaaagttcacaacagtaccaggtgactagttgtgcttgggtgcctgacagttgccagctgtttactggaagcaaatgcggtgtcatcacagcctacacaaacagatttacaagcagcacgccatcagaaatagaaatggagactcaaatacatctctatggtcacacagaagagataaccagcttatttgtttgcaaaccatacagtatactgataagtgtgagcagagacggaacctgcatcatatgggatttaaacaggttatgctatgtacaaagtctggcgggacacaaaagccctgtcacagctgtctctgccagtgaaacctcaggtgatattgctactgtgtgtgattcagctggcggaggcagtgacctcagactctggacggtgaacggggatctcgttggacatgtccactgcagggagatcatctgttccgtggctttctccaaccagcctgagggagtatctatcaatgtaatcgctgggggattagaaaatggaattgtaaggttatggagcacatgggacttaaagcctgtgagagaaattacatttcccaaatcaaataagcccatcatcagccttacattttcttgtgatggccaccatttgtacacagcaaacagtgatgggaccgtgattgcctggtgtcggaaggaccagcagcgcttgaaacagccaatgttctattccttccttagcagctatgcagccgggtgaatgcgaatgaacttcacgttctccaaagcactttaactccaaactagatttgttgacttcaccagttttaggaggttgaacctaaagaaatggatgactggacaaaccatccaaataatgataaagtctattcatctgcacaaaattctgaagagtcacatgatcctaagaggaaagttctgttctattttagtgataatctggaagattgtgtcaatatgcactagccaacaagttttaagcctcgcatggtacattaaaatgatattcttaaaattttttcccaccaaggtattccaaagaaaatattaaggtctcccctttttctatgattccaaaaggaccagtagaatttaaattggttggttgattgtttatataaaacacactaaaattatattttaaaagtttactgccatgaaatactcctcccaccacacacacatgctccaaaagaggaaagaaaaaaagataatttttaggacttgataattgctttctttgagaagcaaattattcagtaggtgcctctgtaccaaatattttatggaatatctaaatactaaaataaactatgaatgaatctcaaaattaggcagtttttgccagttgctttcttagctcaaaggagaaccagaatttttttgacagccacaaacaagaatacaggtatcttggatttcagacacattctgtttcttcataaaaattttacttaaaatctgtaacgctagatattgactatccttagttgagtcactgaggtttaaacacaatggtaagtcttaaagtctgctatttacagagcattgaatctgtaccaatttgcaatagaaagccttcagtatgcaagaagtttgcatgggtattaagaacacagcctaaataaggcatttgatctaatctgcaggaagaattttcttccccaaaacagaattataaaagcttactttaaacaggaggcagaataattcttttaggaaaccatttcattctgtttctactaacctataccatctgagaaattcctaaacatcttggagccgtctgtctctcccatatgatggctgtctgtatatttttacttggggtgctgctttattggctttgaaaacactgtcagataagctcagtaatatgttaccatgggataaaaatatgtatccctgcctaagaataacttgtgcatttgttatggaaatttaattcatatggtgtttacagtactacttttgtaacttccagactttctaaaacattctgcttaaaaaccatataaaatataattccaaagtctctgctgtcaagatagattcgagagaaagcacgtggccatgtatgctttaaccttaaactgcatacacatgtagtgatacctaggctgcatttagatcaccgtgtgctcaggccaggtgtgaatcctgaggtccatggaggtgcagagatgagattactcctattcacgttgaagtgatttgctttgttaacaaaaaattgcagctattgtctagctttcatttttttactgagaactttaaattagtcccctattagaatagggttgctactcatctttttttaaaaaccgaatttcatcatttatctaaagagaaaatatgcagaataactggtcttgttaagagtgcaatattatatttttatgtaaaaataaaaattaatttggggggattatttattcagcatgaaacctaatatgtatatgtttgaaatacttcataatgtgcatgttgtagcaaacatttctgtaaattatcacaagctctgttacctttatatacactgcctcttcaatttggaaataaatttcataaaaatagat

SEQ ID NO: 3219 - protein, 3781 aa, Homo sapiens
MSTDSNSLAREFLTDVNRLCNAVVQRVEAREEEEEETHMATLGQYLVHGRGFLLLTKLNSIIDQALTCREELLTLLLSLLPLVWKIPVQEEKATDFNLPLSADIILTKEKNSSSQRSTQEKLHLEGSALSSQVSAKVNVFRKSRRQRKITYSVRDARKTQLSTSDSEANSDEKGIAMNKHRRPHLLHHFLTSFPKQDHPKAKLDRLATKEQTPPDAMALENSREIIPRQGSNTDILSEPAALSVISNMNNSPFDLCHVLLSLLEKVCKFDVTLNHNSPLAASVVPTLTEFLAGFGDCCSLSDNLESRVVSAGWTEEPVIQRMLFRTVLHLLSVDVSTAEMMPENLRKNLTELLRAALKIRICLEKQPDPFAPRQKKTLQEVQEDFVFSKYRHRALLLPELLEGVLQILICCLQSANPFYFSQAMDLVQEFIQHHGFNLFETAVLQMEWLVLRDGVPPEASEHLKALINSVMKIMSTVKKVKSEQLHHSMCTRKRHRRCEYSHFMHHHRDLSGLLVSAFKNQVSKNPFEETADGDVYYPERCCCIAVCAHQCLRLLQQASLSSTCVQILSGVHNIGICCCMDPKSVIIPLLHAFKLPALKNFQQHILNILNKLILDQLGGAEISPKIKKAACNICTVDSDQLAQLEETLQGNLCDAELSSSLSSPSYRFQGILPSSGSEDLLWKWDALKAYQNFVFEEDRLHSIQIANHICNLIQKGNIVVQWKLYNYIFNPVLQRGVELAHHCQHLSVTSAQSHVCSHHNQCLPQDVLQIYVKTLPILLKSRVIRDLFLSCNGVSQIIELNCLNGIRSHSLKAFETLIISLGEQQKDASVPDIDGIDIEQKELSSVHVGTSFHHQQAYSDSPQSLSKFYAGLKEAYPKRRKTVNQDVHINTINLFLCVAFLCVSKEAESDRESANDSEDTSGYDSTASEPLSHMLPCISLESLVLPSPEHMHQAADIWSMCRWIYMLSSVFQKQFYRLGGFRVCHKLIFMIIQKLFRSHKEEQGKKEGDTSVNENQDLNRISQPKRTMKEDLLSLAIKSDPIPSELGSLKKSADSLGKLELQHSINVEEVSATEAAPEEAKLFTSQESETSLQSIRLLEALLAICLHGARTSQQKMELELPNQNLSVESILFEMRDHLSQSKVIETQLAKPLFDALLRVGNYSADFEHNDAMTEKSHQSAEELSSQPGDFSEEAEDSQCCSFKLLVEEEGYEADSESNPEDGETQDDGVDLKSETEGFSASSSPNDLLENLTQGEIIYPEICMLELNLLSASKAKLDVLAHVFESFLKIIRQKEKNVFLLMQQGTVKNLLGGFLSILTQDDSDFQACQRVLVDLLVSLMSSRTCSEELTLLLRIFLEKSPCTKILLLGILKIIESDTTMSPSQYLTFPLLHAPNLSNGVSSQKYPGILNSKAMGLLRRARVSRSKKEADRESFPHRLLSSWHIAPVHLPLLGQNCWPHLSEGFSVSLWFNVECIHEAESTTEKGKKIKKRNKSLILPDSSFDGTESDRPEGAEYINPGERLIEEGCIHIISLGSKALMIQVWADPHNATLIFRVCMDSNDDMKAVLLAQVESQENIFLPSKWQHLVLTYLQQPQGKRRIHGKISIWVSGQRKPDVTLDFMLPRKTSLSSDSNKTFCMIGHCLSSQEEFLQLAGKWDLGNLLLFNGAKVGSQEAFYLYACGPNHTSVMPCKYGKPVNDYSKYINKEILRCEQIRELFMTKKDVDIGLLIESLSVVYTTYCPAQYTIYEPVIRLKGQMKTQLSQRPFSSKEVQSILLEPHHLKNLQPTEYKTIQGILHEIGGTGIFVFLFARVVELSSCEETQALRVILSLIKYNQQRVHELENCNGLSMIHQVLIKQKCIVGFYILKTLLEGCCGEDIIYMNENGEFKLDVDSNAIIQDVKLLEELLLDWKIWSKAEQGVWETLLAALEVLIRADHHQQMFNIKQLLKAQVVHHFLLTCQVLQEYKEGQLTPMPREVCRSFVKIIAEVLGSPPDLELLTIIFNFLLAVHPPTNTYVCHNPTNFYFSLHIDGKIFQEKVRSIMYLRHSSSGGRSLMSPGFMVISPSGFTDYEGENSSNIIPQQMAAHMLRSRSLPAFPTSSLLTQSQKLTGSLGCSIDRLQNIADTYVATQSKKQNSLGSSDTLKKGKEDAFISSCESAKTVCEMEAVLSAQVSVSDVPKGVLGFPVVKADHKQLGAEPRSEDDSPGDESCPRRPDYLKGLASFQRSHSTIASLGLAFPSQNGSAAVGRWPSLVDRNTDDWENFAYSLGYEPNYNRTASAHSVTEDCLVPICCGELLSGVLLILPDVLLEDVMDKLIQADTLLVLVNHPSPAIQQGVIKLLDAYFARASKEQKDKFLKNRGFSLLANQLYLHRGTQELLECFIEMFFGRHIGLDEEFDLEDVRNMGLFQKWSVIPILGLIETSLYDNILLHNALLLLLQILNSCSKVADMLLDNGLLYVLCNTVAALNGLEKNIPMSEYKLLACDIQQLFIAVTIHACSSSGSQYFRVIEDLIVMLGYLQNSKNKRTQNMAVQLRVLQAAMEFIRTTANHDSENLTDSLQSPSAPHHAVVQKRKSIAGPRKFPLAQTESLLMKMRSVANDELHVMMQRRMSQENPSQATETELAQRLQRLTVLAVNRIIYQEFNSDIIDILRTPENVTQSKTSVFQTEISEENIHHEQSSVFNPFQKEIFTYLVEGFKVSIGSSKASGSKQQWTKILWSCKETFRMQLGRLLVHILSPAHAAQERKQIFEIVHEPNHQEILRDCLSPSLQHGAKLVLYLSELIHNHQGELTEEELGTAELLMNALKLCGHKCIPPSASTKADLIKMIKEEQKKYETEEGVNKAAWQKTVNNNQQSLFQRLDSKSKDISKIAADITQAVSLSQGNERKKVIQHIRGMYKVDLSASRHWQELIQQLTHDRAVWYDPIYYPTSWQLDPTEGPNRERRRLQRCYLTIPNKYLLRDRQKSEDVVKPPLSYLFEDKTHSSFSSTVKDKAASESIRVNRRCISVAPSRETAGELLLGKCGMYFVEDNASDTVESSSLQGELEPASFSWTYEEIKEVHKRWWQLRDNAVEIFLTNGRTLLLAFDNTKVRDDVYHNILTNNLPNLLEYGNITALTNLWYTGQITNFEYLTHLNKHAGRSFNDLMQYPVFPFILADYVSETLDLNDLLIYRNLSKPIAVQYKEKEDRYVDTYKYLEEEYRKGAREDDPMPPVQPYHYGSHYSNSGTVLHFLVRMPPFTKMFLAYQDQSFDIPDRTFHSTNTTWRLSSFESMTDVKELIPEFFYLPEFLVNREGFDFGVRQNGERVNHVNLPPWARNDPRLFILIHRQALESDYVSQNICQWIDLVFGYKQKGKASVQAINVFHPATYFGMDVSAVEDPVQRRALETMIKTYGQTPRQLFHMAHVSRPGAKLNIEGELPAAVGLLVQFAFRETREQVKEITYPSPLSWIKGLKWGEYVGSPSAPVPVVCFSQPHGERFGSLQALPTRAICGLSRNFCLLMTYSKEQGVRSMNSTDIQWSAILSWGYADNILRLKSKQSEPPVNFIQSSQQYQVTSCAWVPDSCQLFTGSKCGVITAYTNRFTSSTPSEIEMQIHLYGHTEEITSLFVCKPYSILISVSRDGTCIIWDLNRLCYVQSLAGHKSPVTAVSASETSGDIATVCDSAGGGSDLRLWTVNGDLVGHVHCREIICSVAFSNQPEGVSINVIAGGLENGIVRLWSTWDLKPVREITFPKSNKPIISLTFSCDGHHLYTANSDGTVIAWCRKDQQRLKQPMFYSFLSSYAAG

SEQ ID NO: 3220 - DNA, 13426 bp, Homo sapiens
gcgcggcggcggcggcagcggcgtcggctcggggttctccgggagagggggagtgcgcggcggccgcagctgccacaaaccaggtgaagctttgttctaagaatatttgtttcatctagtttatgagtccaaatgatatagactgtaaatgtcacagcagtggtgaaagactgctcggtcatgagcaccgacagtaactcactggcacgtgaatttctgaccgatgtcaaccggctttgcaatgcagtggtccagagggtggaggccagggaggaagaagaggaggagacgcacatggcaacccttggacagtaccttgtccatggtcgaggatttctattacttaccaagctaaattctataattgatcaggcattgacatgtagagaagaactcctgactcttcttctgtctctccttccactggtatggaagatacctgtccaagaagaaaaggcaacagattttaacctaccgctctcagcagatataatcctgaccaaagaaaagaactcaagttcacaaagatccactcaggaaaaattacatttagaaggaagtgccctgtctagtcaggtttctgcaaaagtaaatgtttttcgaaaaagcagacgacagcgtaaaattacccatcgctattctgtaagagatgcaagaaagacacagctctccacctcagattcagaagccaattcagatgaaaaaggcatagcaatgaataagcatagaaggccccatctgctgcatcattttttaacatcgtttcctaaacaagaccaccccaaagctaaacttgaccgcttagcaaccaaagaacagactcctccagatgctatggctttggaaaattccagagagattattccaagacaggggtcaaacactgacattttaagtgagccagctgccttgtctgttatcagtaacatgaacaattctccatttgacttatgtcatgttttgttatctttattagaaaaagtttgtaagtttgacgttaccttgaatcataattctcctttagcagccagtgtagtgcccacactaactgaattcctagcaggctttggggactgctgcagtctgagcgacaacttggagagtcgagtagtttctgcaggttggaccgaagaaccggtggctttgattcaaaggatgctctttcgaacagtgttgcatcttctgtcagtagatgttagtactgcagagatgatgccagaaaatcttaggaaaaatttaactgaattgcttagagcagctttaaaaattagaatatgcctagaaaagcagcctgacccttttgcaccaagacaaaagaaaacactgcaggaggttcaggaagattttgtgttttcaaagtatcgtcatagagcccttcttttacctgagcttttggaaggagttcttcagattctgatctgttgtcttcaaagtgcagcttcaaatcccttctacttcagtcaagccatggatttggttcaagaattcattcagcatcatggatttaatttatttgaaacagcagttcttcaaatggaatggctggttttaagagatggagttcctcccgaggcctcagagcatttgaaagccctaataaatagtgtgatgaaaataatgagcactgtcaaaaaagtgaaatcagagcaacttcatcattcgatgtgtacaagaaaaaggcacagacgatgtgaatattctcattttatgcatcatcaccgagatctctcaggtcttctggtttcggcttttaaaaaccaggtttccaaaaacccatttgaagagactgcagatggagatgtttattatcctgagcggtgctgttgcattgcagtgtgtgcccatcagtgcttgcgcttactacagcaggcttccttgagcagcacttgtgtccagatcctatcgggtgttcataacattggaatatgctgttgtatggatcccaaatctgtaatcattcctttgctccatgcttttaaattgccagcactgaaaaattttcagcagcatatattgaatatccttaacaaacttattttggatcagttaggaggagcagagatatcaccaaaaattaaaaaagcagcttgtaatatttgtactgttgactctgaccaactagcccaattagaagagacactgcagggaaacttatgtgatgctgaactctcctcaagtttatccagtccttcttacagatttcaagggatcctgcccagcagtggatctgaagatttgttgtggaaatgggatgctttaaaggcttatcagaactttgtttttgaagaagacagattacatagtatacagattgcaaatcacatttgcaatttaatccagaaaggcaatatagttgttcagtggaaattatataattacatatttaatcctgtgctccaaagaggagttgaattagcacatcattgtcaacacctaagcgttacttcagctcaaagtcatgtatgtagccatcataaccagtgcttgcctcaggacgtgcttcagatttatgtaaaaactctgcctatcctgcttaaatccagggtaataagagatttgtttttgagttgtaatggagtaagtcaaataatcgaattaaattgcttaaatggtattcgaagtcattctctaaaagcatttgaaactctgataatcagcctaggggagcaacagaaagatgcctcagttccagatattgatgggatagacattgaacagaaggagttgtcctctgtacatgtgggtacttcttttcatcatcagcaagcttattcagattctcctcagagtctcagcaaattttatgctggcctcaaagaagcttatccaaagagacggaagactgttaaccaagatgttcatatcaacacaataaacctattcctctgtgtggcttttttatgcgtaagtaaagaagcagagtctgacagggagtcggccaatgactcagaagatacttctggctatgacagcacagccagcgagcctttaagtcatatgctgccatgtatatctctcgagagccttgtcttgccttctcctgaacatatgcaccaagcagcagacatttggtctatgtgtcgttggatctacatgttgagttcagtgttccagaaacagttttataggcttggtggtttccgagtatgccataagttaatatttatgataatacagaaactgttcagaagtcacaaagaggagcaaggaaaaaaggagggagatacaagtgtaaatgaaaaccaggatttaaacagaatttctcaacctaagagaactatgaaggaagatttattatctttggctataaaaagtgaccccataccatcagaactaggtagtctaaaaaagagtgctgacagtttaggtaaattagagttacagcatatttcttccataaatgtggaagaagtttcagctactgaagccgctcccgaggaagcaaagctatttacaagtcaagaaagtgagacctcacttcaaagtatacgacttttggaagcccttctggccatttgtcttcatggtgccagaactagtcaacagaagatggaattggagttacctaatcagaacttgtctgtggaaagtatattatttgaaatgagggaccatctttcccagtcaaaggtgattgaaacacaactagcaaagcctttatttgatgccctgcttcgagttgccctcgggaattattcagcagattttgaacataatgatgctatgactgagaagagtcatcaatctgcagaagaattgtcatcccagcctggtgatttttcagaagaagctgaggattctcagtgttgtagttttaaacttttagttgaagaagaaggttacgaagcagatagtgaaagcaatcctgaagatggcgaaacccaggatgatggggtagacttaaagtctgaaacagaaggtttcagtgcatcaagcagtccaaatgacttactcgaaaacctcactcaaggggaaataatttatcctgagatttgtatgctggaattaaatttgctttctgctagtaaagccaaacttgatgtgcttgcccatgtatttgagagttttttgaaaattattaggcagaaagaaaagaatgtttttctgctcatgcaacagggaactgtgaaaaatcttttaggagggttcttgagtattttaacacaggatgattctgattttcaagcatgccagagagtattggtggatcttttggtatctttgatgagttcaagaacatgttcagaagagctaacccttcttttgagaatatttctggagaaatctccttgtacaaaaattcttcttctgggtattctgaaaattattgaaagtgatactactatgagcccttcacagtatctaaccttccctttactgcacgctccaaatttaagcaacggtgtttcatcacaaaagtatcctgggattttaaacagtaaggccatgggtttattgagaagagcacgagtttcacggagcaagaaagaggctgatagagagagttttccccatcggctgctttcatcttggcacatagccccagtccacctgccgttgctggggcaaaactgctggccacacctatcagaaggtttcagtgtttccctgtggtttaatgtggagtgtatccatgaagctgagagtactacagaaaaaggaaagaagataaagaaaagaaacaaatcattaattttaccagatagcagttttgatggtacagagagcgacagaccagaaggtgcagagtacataaatcctggtgaaagactcatagaagaaggatgtattcatataatttcactgggatccaaagcgttgatgatccaagtgtgggctgatccccacaatgccactcttatctttcgtgtgtgcatggattcaaatgatgacatgaaagctgttttactagcacaggttgaatcacaggagaatattttcctcccaagcaaatggcaacatttagtactcacctacttacagcagccccaagggaaaaggaggattcatgggaaaatctccatatgggtctctggacagaggaagcctgatgttactttggattttatgcttccaagaaaaacaagtttgtcatctgatagcaataaaacattttgcatgattggccattgtttatcatcccaagaagagtttttgcagttggctggaaaatgggacctgggaaatttgcttctcttcaacggagctaaggttggttcacaagaggccttttatctgtatgcttgtggacccaaccatacatctgtaatgccatgtaagtatggcaagccagtcaatgactactccaaatatattaataaagaaattttgcgatgtgaacaaatcagagaactttttatgaccaagaaagatgtggatattggtctcttaattgaaagtctttcagttgtttatacaacttactgtcctgctcagtataccatctatgaaccagtgattagacttaaaggtcaaatgaaaacccaactctctcaaagacccttcagctcaaaagaagttcagagcatcttattagaacctcatcatctaaagaatctccaacctactgaatataaaactattcaaggcattctgcacgaaattggtggaactggcatatttgtttttctctttgccagggttgttgaactcagtagctgtgaagaaactcaagcattagcactgcgagttatactctcattaattaaatacaaccaacaaagagtacatgaattagaaaattgtaatggactttctatgattcatcaggtgttgatcaaacaaaaatgcattgttgggttttacattttgaagacccttcttgaaggatgctgtggtgaagatattatttatatgaatgagaatggagagtttaagttggatgtagactctaatgctataatccaagatgttaagctgttagaggaactattgcttgactggaagatatggagtaaagcagaggcatgtgtttgggaaactttgctagcagctctagaagtcctcatcagagcagatcaccaccagcagatgtttaatattaagcagttattgaaagctcaagtggttcatcactttctactgacttgtcaggttttgcaggaatacaaagaggggcaactcacacccatgccccgagaggtttgtagatcatttgtgaaaattatagcagaagtccttggatctcctccagatttggaattattgacaattatcttcaatttccttttagcagttcaccctcctactaatacttacgtttgtcacaatcccacgaacttctacttttctttgcacatagatggcaagatctttcaggagaaagtgcggtcaatcatgtacctgaggcattccagcagtggaggaaggtcccttatgagccctggatttatggtaataagcccatctggttttactgcttcaccatatgaaggagagaattcctctaatattattccacaacagatggccgcccatatgctgcgttctagaagcctaccagcattccctacttcttcactactaacgcaatcacaaaaactgactggaagtttgggttgtagtatcgacaggttacaaaatattgcagatacttatgttgccacccaatcaaagaaacaaaattctttggggagttccgacacactgaaaaaaggcaaagaggacgcattcatcagtagctgtgagtctgcaaaaactgtttgtgaaatggaagctgtcctctcagcccaggtctctgtcagtgatgtcccaaagggagtgctgggatttccagtggtcaaagcagatcataaacagttgggagcagaacccaggtcagaagatgacagtcctggggatgagtcctgcccacgccgacctgattacctaaagggattggcctccttccagcgaagccacagcactattgcaagccttgggctagcttttccttcacagaacggatctgcagctgttggccgttggccaagtcttgttgatagaaacactgatgattgggaaaactttgcctattctcttggttatgagccaaattacaaccgaactgcaagtgctcacagtgtaactgaagactgtttggtacctatatgctgtggattatatgaactcctaagtggggttcttcttatcctgcctgatgttttgcttgaagatgtgatggacaagcttattcaagcagatacacttttggtcctcgttaaccacccatcaccagctatacaacaaggtgttattaaactattagatgcatattttgctagagcatctaaggaacaaaaagataaatttctgaagaatcgtggattttccttgctagccaaccagttgtatcttcatcgaggaactcaagaattgttagaatgcttcatcgaaatgttctttggtcgacatattggccttgatgaagaatttgatctggaagatgtgagaaacatgggattgtttcagaagtggtctgtcattcctattctgggactaatagagacctctctatatgacaacatactcttgcataatgctcttttacttcttctccaaattttaaattcttgttctaaggtagcagatatgttgctggataatggtctactctatgtgttatgtaatacagtagcagccctgaatggattagaaaagaacattcccatgagtgaatataaattgcttgcttgtgatatacagcaacttttcatagcagttacaattcatgcttgcagttcctcaggctcacaatattttagggttattgaagaccttattgtaatgcttggatatcttcaaaatagcaaaaacaagaggacacaaaatatggctgttgcactacagcttagagttctccaggctgctatggaatttataaggaccaccgcaaatcatgactctgaaaacctcacagattcactccagtcaccttctgctccccatcatgcagtagttcaaaagcggaaaagcattgctggtcctcgaaaatttccccttgctcaaactgaatcgcttctgatgaaaatgcgttcagtggcaaatgatgagcttcatgtgatgatgcaacggagaatgagccaagagaaccctagccaagcaactgaaacggaacttgcgcagagactacagaggctcactgttttagcagtcaacaggattatttatcaagaatttaattcagacattattgacattttgagaactccagaaaatgtaactcaaagcaagacctcagttttccagaccgaaatttctgaggaaaatattcatcatgaacagtcttctgttttcaatccatttcagaaagaaatttttacatatctggtagaaggattcaaagtatctattggttcaagtaaagccagtggttccaagcagcaatggactaaaattctgtggtcttgtaaggagaccttccgaatgcagcttgggagactactagtgcatattttgtcgccagcccacgctgcacaagagagaaagcaaatttttgaaatagttcatgaaccaaatcatcaggaaatactacgagactgtctcagcccatccctacaacatggagccaagttagttttgtatttgtcagagttgatacataatcaccaaggtgaattgactgaagaagagctaggcacagcagaactgcttatgaatgctttgaagttatgtggtcacaagtgcatccctcccagtgcatcaacaaaagcagaccttattaaaatgatcaaagaggaacaaaagaaatatgaaactgaagaaggagtgaataaagctgcttggcagaaaacagttaacaataatcaacaaagtctctttcagcgtctggattcaaaatcaaaggatatatctaaaatagctgcagatatcacccaggcagtgtctctctcccaaggaaatgagagaaaaaaggtgatccagcatattagaggaatgtataaagtagatttgagtgccagcagacattggcaggaacttattcagcagctgacacatgatagagcagtatggtatgaccccatctactatccaacctcatggcagttggatccaacagaagggccaaatcgagagaggagacgtttacagagatgttatttaactattccaaataagtatctccttagggatagacagaaatcagaagatgttgtcaaaccaccactctcttacctgtttgaagacaaaactcattcttctttctcttctactgtcaaagacaaagctgcaagtgaatctataagagtgaatcgaagatgcatcagtgttgcaccatctagagagacagctggtgaattgttactaggtaaatgtggaatgtattttgtggaagataatgcttctgatacagttgaaagttcgagccttcagggagagttggaaccagcatcattttcctggacatatgaagaaattaaagaagttcacaagcgttggtggcaattgagagataatgctgtagaaatctttctaacaaatggcagaacactcctgttggcatttgataacaccaaggttcgtgatgatgtataccacaatatactcacaaataacctccctaatcttctggaatatggtaacatcaccgctctgacaaatttatggtatactgggcaaattactaattttgaatatttgactcacttaaacaaacatgctggccgatccttcaatgatctcatgcagtatcctgtgttcccatttatacttgctgactacgttagtgagacacttgacctcaatgatctgttgatatacagaaatctctctaaacctatagctgttcagtataaagaaaaagaagatcgttatgtggacacatacaagtacttggaggaagagtaccgcaaaggagccagagaagatgaccccatgcctcccgtgcagccctatcactatggctcccactattccaatagcggcactgtgcttcacttcctggtcaggatgcctcctttcactaaaatgtttttagcctatcaagatcaaagttttgacattccagacagaacttttcattctacaaatacaacttggcgactctcatcttttgaatctatgactgatgtgaaagaacttatcccagagtttttctatcttccagagttcctagttaaccgtgaaggttttgattttggtgtgcgtcagaatggtgaacgggttaatcacgtcaaccttcccccttgggcgcgtaatgatcctcgtctttttatcctcatccatcggcaggctctagagtctgactacgtgtcgcagaacatctgtcagtggattgacttggtgtttgggtataagcaaaaggggaaggcttctgttcaagcgatcaatgtttttcatcctgctacatattttggaatggatgtctctgcagttgaagatccagttcagagacgagcgctagaaaccatgataaaaacctacgggcagactccccgtcagctgttccacatggcccatgtgagcagacctggagccaagctcaatattgaaggagagcttccagctgctgtggggttgctagtgcagtttgctttcagggagacccgagaacaggtcaaagaaatcacctatccgagtcctttgtcatggataaaaggcttgaaatggggggaatacgtgggttcccccagtgctccagtacctgtggtctgcttcagccagccccacggagaaagatttggctctctccaggctctgcccaccagagcaatctgtggtttgtcacggaatttctgtcttctgatgacatatagcaaggaacaaggtgtgagaagcatgaacagtacggacattcagtggtcagccatcctgagctggggatatgctgataatattttaaggttgaagagtaaacaaagtgagcctccagtaaactttattcaaagttcacaacagtaccaggtgactagttgtgcttgggtgcctgacagttgccagctgtttactggaagcaaatgcggtgtcatcacagcctacacaaacagatttacaagcagcacgccatcagaaatagaaatggagactcaaatacatctctatggtcacacagaagagataaccagcttatttgtttgcaaaccatacagtatactgataagtgtgagcagagacggaacctgcatcatatgggatttaaacaggttatgctatgtacaaagtctggcgggacacaaaagccctgtcacagctgtctctgccagtgaaacctcaggtgatattgctactgtgtgtgattcagctggcggaggcagtgacctcagactctggacggtgaacggggatctcgttggacatgtccactgcagggagatcatctgttccgtggctttctccaaccagcctgagggagtatctatcaatgtaatcgctgggggattagaaaatggaattgtaaggttatggagcacatgggacttaaagcctgtgagagaaattacatttcccaaatcaaataagcccatcatcagccttacattttcttgtgatggccaccatttgtacacagcaaacagtgatgggaccgtgattgcctggtgtcggaaggaccagcagcgcttgaaacagccaatgttctattccttccttagcagctatgcagccgggtgaatgcgaatgaacttcacgttctccaaagcactttaactccaaactagatttgttgacttcaccagttttaggaggttgaacctaaagaaatggatgactggacaaaccatccaaataatgataaagtctattcatctgcacaaaattctgaagagtcacatgatcctaagaggaaagttctgttctattttagtgataatctggaagattgtgtcaatatgcactagccaacaagttttaagcctcgcatggtacattaaaatgatattcttaaaattttttcccaccaaggtattccaaagaaaatattaaggtctcccctttttctatgattccaaaaggaccagtagaatttaaattggttggttgattgtttatataaaacacactaaaattatattttaaaagtttactgccatgaaatactcctcccaccacacacacatgctccaaaagaggaaagaaaaaaagataatttttaggacttgataattgctttctttgagaagcaaattattcagtaggtgcctctgtaccaaatattttatggaatatctaaatactaaaataaactatgaatgaatctcaaaattaggcagtttttgccagttgctttcttagctcaaaggagaaccagaatttttttgacagccacaaacaagaatacaggtatcttggatttcagacacattctgtttcttcataaaaattttacttaaaatctgtaacgctagatattgactatccttagttgagtcactgaggtttaaacacaatggtaagtcttaaagtctgctatttacagagcattgaatctgtaccaatttgcaatagaaagccttcagtatgcaagaagtttgcatgggtattaagaacacagcctaaataaggcatttgatctaatctgcaggaagaattttcttccccaaaacagaattataaaagcttactttaaacaggaggcagaataattcttttaggaaaccatttcattctgtttctactaacctataccatctgagaaattcctaaacatcttggagccgtctgtctctcccatatgatggctgtctgtatatttttacttggggtgctgctttattggctttgaaaacactgtcagataagctcagtaatatgttaccatgggataaaaatatgtatccctgcctaagaataacttgtgcatttgttatggaaatttaattcatatggtgtttacagtactacttttgtaacttccagactttctaaaacattctgcttaaaaaccatataaaatataattccaaagtctctgctgtcaagatagattcgagagaaagcacgtggccatgtatgctttaaccttaaactgcatacacatgtagtgatacctaggctgcatttagatcaccgtgtgctcaggccaggtgtgaatcctgaggtccatggaggtgcagagatgagattactcctattcacgttgaagtgatttgctttgttaacaaaaaattgcagctattgtctagctttcatttttttactgagaactttaaattagtcccctattagaatagggttgctactcatctttttttaaaaaccgaatttcatcatttatctaaagagaaaatatgcagaataactggtcttgttaagagtgcaatattatatttttatgtaaaaataaaaattaatttggggggattatttattcagcatgaaacctaatatgtatatgtttgaaatacttcataatgtgcatgttgtagcaaacatttctgtaaattatcacaagctctgttacctttatatacactgcctcttcaatttggaaataaatttcataaaaatagat

SEQ ID NO: 3221 - protein, 3781 aa, Homo sapiens
MSTDSNSLAREFLTDVNRLCNAVVQRVEAREEEEEETHMATLGQYLVHGRGFLLLTKLNSIIDQALTCREELLTLLLSLLPLVWKIPVQEEKATDFNLPLSADIILTKEKNSSSQRSTQEKLHLEGSALSSQVSAKVNVFRKSRRQRKITYSVRDARKTQLSTSDSEANSDEKGIAMNKHRRPHLLHHFLTSFPKQDHPKAKLDRLATKEQTPPDAMALENSREIIPRQGSNTDILSEPAALSVISNMNNSPFDLCHVLLSLLEKVCKFDVTLNHNSPLAASVVPTLTEFLAGFGDCCSLSDNLESRVVSAGWTEEPVIQRMLFRTVLHLLSVDVSTAEMMPENLRKNLTELLRAALKIRICLEKQPDPFAPRQKKTLQEVQEDFVFSKYRHRALLLPELLEGVLQILICCLQSANPFYFSQAMDLVQEFIQHHGFNLFETAVLQMEWLVLRDGVPPEASEHLKALINSVMKIMSTVKKVKSEQLHHSMCTRKRHRRCEYSHFMHHHRDLSGLLVSAFKNQVSKNPFEETADGDVYYPERCCCIAVCAHQCLRLLQQASLSSTCVQILSGVHNIGICCCMDPKSVIIPLLHAFKLPALKNFQQHILNILNKLILDQLGGAEISPKIKKAACNICTVDSDQLAQLEETLQGNLCDAELSSSLSSPSYRFQGILPSSGSEDLLWKWDALKAYQNFVFEEDRLHSIQIANHICNLIQKGNIVVQWKLYNYIFNPVLQRGVELAHHCQHLSVTSAQSHVCSHHNQCLPQDVLQIYVKTLPILLKSRVIRDLFLSCNGVSQIIELNCLNGIRSHSLKAFETLIISLGEQQKDASVPDIDGIDIEQKELSSVHVGTSFHHQQAYSDSPQSLSKFYAGLKEAYPKRRKTVNQDVHINTINLFLCVAFLCVSKEAESDRESANDSEDTSGYDSTASEPLSHMLPCISLESLVLPSPEHMHQAADIWSMCRWIYMLSSVFQKQFYRLGGFRVCHKLIFMIIQKLFRSHKEEQGKKEGDTSVNENQDLNRISQPKRTMKEDLLSLAIKSDPIPSELGSLKKSADSLGKLELQHSINVEEVSATEAAPEEAKLFTSQESETSLQSIRLLEALLAICLHGARTSQQKMELELPNQNLSVESILFEMRDHLSQSKVIETQLAKPLFDALLRVGNYSADFEHNDAMTEKSHQSAEELSSQPGDFSEEAEDSQCCSFKLLVEEEGYEADSESNPEDGETQDDGVDLKSETEGFSASSSPNDLLENLTQGEIIYPEICMLELNLLSASKAKLDVLAHVFESFLKIIRQKEKNVFLLMQQGTVKNLLGGFLSILTQDDSDFQACQRVLVDLLVSLMSSRTCSEELTLLLRIFLEKSPCTKILLLGILKIIESDTTMSPSQYLTFPLLHAPNLSNGVSSQKYPGILNSKAMGLLRRARVSRSKKEADRESFPHRLLSSWHIAPVHLPLLGQNCWPHLSEGFSVSLWFNVECIHEAESTTEKGKKIKKRNKSLILPDSSFDGTESDRPEGAEYINPGERLIEEGCIHIISLGSKALMIQVWADPHNATLIFRVCMDSNDDMKAVLLAQVESQENIFLPSKWQHLVLTYLQQPQGKRRIHGKISIWVSGQRKPDVTLDFMLPRKTSLSSDSNKTFCMIGHCLSSQEEFLQLAGKWDLGNLLLFNGAKVGSQEAFYLYACGPNHTSVMPCKYGKPVNDYSKYINKEILRCEQIRELFMTKKDVDIGLLIESLSVVYTTYCPAQYTIYEPVIRLKGQMKTQLSQRPFSSKEVQSILLEPHHLKNLQPTEYKTIQGILHEIGGTGIFVFLFARVVELSSCEETQALRVILSLIKYNQQRVHELENCNGLSMIHQVLIKQKCIVGFYILKTLLEGCCGEDIIYMNENGEFKLDVDSNAIIQDVKLLEELLLDWKIWSKAEACVWETLLAALEVLIRADHHQQMFNIKQLLKAQVVHHFLLTCQVLQEYKEGQLTPMPREVCRSFVKIIAEVLGSPPDLELLTIIFNFLLAVHPPTNTYVCHNPTNFYFSLHIDGKIFQEKVRSIMYLRHSSSGGRSLMSPGFMVISPSGFTDYEGENSSNIIPQQMAAHMLRSRSLPAFPTSSLLTQSQKLTGSLGCSIDRLQNIADTYVATQSKKQNSLGSSDTLKKGKEDAFISSCESAKTVCEMEAVLSAQVSVSDVPKGVLGFPVVKADHKQLGAEPRSEDDSPGDESCPRRPDYLKGLASFQRSHSTIASLGLAFPSQNGSAAVGRWPSLVDRNTDDWENFAYSLGYEPNYNRTASAHSVTEDCLVPICCGELLSGVLLILPDVLLEDVMDKLIQADTLLVLVNHPSPAIQQGVIKLLDAYFARASKEQKDKFLKNRGFSLLANQLYLHRGTQELLECFIEMFFGRHIGLDEEFDLEDVRNMGLFQKWSVIPILGLIETSLYDNILLHNALLLLLQILNSCSKVADMLLDNGLLYVLCNTVAALNGLEKNIPMSEYKLLACDIQQLFIAVTIHACSSSGSQYFRVIEDLIVMLGYLQNSKNKRTQNMAVQLRVLQAAMEFIRTTANHDSENLTDSLQSPSAPHHAVVQKRKSIAGPRKFPLAQTESLLMKMRSVANDELHVMMQRRMSQENPSQATETELAQRLQRLTVLAVNRIIYQEFNSDIIDILRTPENVTQSKTSVFQTEISEENIHHEQSSVFNPFQKEIFTYLVEGFKVSIGSSKASGSKQQWTKILWSCKETFRMQLGRLLVHILSPAHAAQERKQIFEIVHEPNHQEILRDCLSPSLQHGAKLVLYLSELIHNHQGELTEEELGTAELLMNALKLCGHKCIPPSASTKADLIKMIKEEQKKYETEEGVNKAAWQKTVNNNQQSLFQRLDSKSKDISKIAADITQAVSLSQGNERKKVIQHIRGMYKVDLSASRHWQELIQQLTHDRAVWYDPIYYPTSWQLDPTEGPNRERRRLQRCYLTIPNKYLLRDRQKSEDVVKPPLSYLFEDKTHSSFSSTVKDKAASESIRVNRRCISVAPSRETAGELLLGKCGMYFVEDNASDTVESSSLQGELEPASFSWTYEEIKEVHKRWWQLRDNAVEIFLTNGRTLLLAFDNTKVRDDVYHNILTNNLPNLLEYGNITALTNLWYTGQITNFEYLTHLNKHAGRSFNDLMQYPVFPFILADYVSETLDLNDLLIYRNLSKPIAVQYKEKEDRYVDTYKYLEEEYRKGAREDDPMPPVQPYHYGSHYSNSGTVLHFLVRMPPFTKMFLAYQDQSFDIPDRTFHSTNTTWRLSSFESMTDVKELIPEFFYLPEFLVNREGFDFGVRQNGERVNHVNLPPWARNDPRLFILIHRQALESDYVSQNICQWIDLVFGYKQKGKASVQAINVFHPATYFGMDVSAVEDPVQRRALETMIKTYGQTPRQLFHMAHVSRPGAKLNIEGELPAAVGLLVQFAFRETREQVKEITYPSPLSWIKGLKWGEYVGSPSAPVPVVCFSQPHGERFGSLQALPTRAICGLSRNFCLLMTYSKEQGVRSMNSTDIQWSAILSWGYADNILRLKSKQSEPPVNFIQSSQQYQVTSCAWVPDSCQLFTGSKCGVITAYTNRFTSSTPSEIEMQIHLYGHTEEITSLFVCKPYSILISVSRDGTCIIWDLNRLCYVQSLAGHKSPVTAVSASETSGDIATVCDSAGGGSDLRLWTVNGDLVGHVHCREIICSVAFSNQPEGVSINVIAGGLENGIVRLWSTWDLKPVREITFPKSNKPIISLTFSCDGHHLYTANSDGTVIAWCRKDQQRLKQPMFYSFLSSYAAG

SEQ ID NO: 3222 - DNA, 49459 bp, Mus musculus
catctatgcagacaagatactcatacacataaaataaaaacacatctttaaaactaaactacacaaatgttgatagaagcattatttaacagtactctgaagtggaagcaattcaaatggccactaactgataaaatatggtatatattttatgactcaccataaaaataaagcattaatgatctaaagcttgaaaacatcacaagtgaaagaagctacttctaaaggaccacaaatactcaagtgtttgattccactaatataaaatattaactgcagtaaatcaagagtctgtaaataaataattatttaggactgagttgggggaattggcaaagtagatagtgatatgactgaatgggtggaatttttccttaagataaattttactgctctgaattatgataccttcttaatcctttgaatatactaaaaaacatacagcaggtgacaaaaggtatatacactgtatatgaattatagggcaataaagctaaaattaacttcaaatgatctaaatcaaaacactggttactaataaaattcactgggaaggacagaatgaaactttcagggttgctgaaaatgtattattgccatttgggtggtagttacatatgtaccttaagtcacagttaacaatggttccttttgtcagtctggaggttgctcagaaaattggacataatactactggaagatccagcaatacctttcctgggtatatacccagaagaagttccaactggtaataagaacacatgctcctctatgttcatagaagccttatttataatagccagaatctggaaagaacccagatgtccctcaacagaagaatggatacagaaaatgtggtacatttacacaatggagtatactcagctattaaaaacaatggatttatgaaattcttggacaaatgtatctggaggatatcatccttagtgaggtaacccaatcacaaaagaagtcattagatatgcactcactgataagtgaatattagcccagaaacatagaacacccaagatacaatttgcaaaacacaagaaaatcaagaagagggaagcaatgggtggacacttcattcctccttagaatagggaacaaaatacccatgaaaggagttacagagacaaagtttggagctaagacgaaaggatggactatccagagactatcccacccagggatccatcccataatcagctactaaacccagacactattgcatatgccagaaagattttgctgaagggaccctgttatagctttctcatatgaggctatgccagtgcctggcaaatatggaagtggatgctcacagtcatctataagatggaacacagggcccccaatagagaagctagagaaagcacccaaggagctaaaggggtctgcaaccctataggtggaacaacaatatgaactaaccagtacccccagagctcatatctctagctgcatatgtagcagaagatggcctagtcggccatcacaggaaagagaggtcccttggtattgcaaactttatatgccccagtacaggggaacatcagggccaagaagcaggagtgggtgggtaggggagtgggacagagggagggtatagggaactttcgggatagcatttgaaatgtatataaagaaaatatctaataataaataaataaaaattaataaaatagtaaaaaaaatggttccttttactatatgtaatgataccttaaaaacaattttaagcagtaatatgtgtttcatcagtgactattccaagtcattctaagaaatctgaaaagcatgtcgtttttatgaggaaacaagttcaggaaagttactaaccaaacaagtaaaacactgccatttttacctgctaatccaaaaacctaactccaatatctctgcacagctctagctggcctagaactcactatgtagaacccactggccttgaactcacagagcctgcctctgccttccaagagtggtgattaaaggtatgcacaaccatgcctgactccattacctttatagcacctctaacaagaatctctacttaacacatggtatacgcacagaaatatttactgaatgaatcagtagcataaagtagatatttaaattattaaatgttttattaaaacgactggggtatagctcagtagtagagcatgttattatcatgtacaaggctttggtttccatccttagcagctacatgaataaataagtaagtaagctacagaaggacaagacacaggaggatatgacctgaaggcagatatggggtaggggtattaaaactcggtgaagggctagagatggagctcagtagctagccaccctgcatgtgcaaggttctaggtttgattcagcaccaccacaacatcaaaaacaaagaagtaacctttaaagctagacgagcatatgacatcaaagtaggaattagcataggagaaacctggagaagttaattaggaccctaggaaaaatacccctaggaaaataccctatatgaagtggcttctaacttacacatttcctattcctgttgtattactaaaaaacagtatgccaatagcagctatatcttcaatacaagtaatttttctaaaatctgtaatttatgatacttatagttgacatcttctttaactttattttttattattattaatttttaaaatttatttattgtatgtaagtacactgtagctgtcttcagacacaccagaagagggcgccagatctcactgcggatggttgtgagctaccctgtggttgctgggatttgaactcaggacctccagaagattagtcaatgctcttaactgctgagcaatctctccagcccattttttttgttttgttttgtttttcgagacagggtttctctgtatagcccaggctgtcctggaactcactttgtagaccagctggcctcgaactcagaaatccacctgcctctgcctcccaaaggtgtgcgccaccactgcccagctttttaatatttttaagtgtgtctgtgtatacatgtacacaggagtgcaggttctaacaattttttaaattattttttattttaaaatttaaaataaaatttatctttattttattaaaaaaacatagccagctggacagtggtgacacatgcctttaatcccagcacttgggaggcagaggcaggcggatttctgagtttgaggccagcctagtctacagagtgagttccaggacagccagggctacacagagaaaccctgtctcgaaaaaccagtaataatagtagtagtagtagtagtagtagtaatattaataataataataataataataacaataatagagccttgaattccaccacttgggaggcagaagcaggaggatccctgtaagtttgagccagcatggtctacatagcaattttcaggccaggcagaactatatagtgagactttgtctcaaaaacataaaataaaacttataaatgcacaaggctcttggagttgatctccagcacaaaagaagaagtgagaaagcttgatagaataaactcctttatcaattgattacaattaaaagtgatttgtttctgtaactgagtaaggtaaatgcatacctataaaatctctctcttcttctctctctctctctctctctctctctctctctctctctctcttacacacacacatacatacacatatagcaacagaattcaggggagattattcagtgggtaaattccagcaggtggatagtgagtagggggatccccgaggaagccagccagacataccaaccaactccaagagaccctgccccaattaagatggagagacatttaagaagattcccactaacatcggtgtagtggtggagggtggtgtgtgtgtgtgcccgtgtgtgtgttcacacccagtgtgcccacaagtgtgcaaaaataaaagatttcaaacgcacccggagcaataagttatcactgcctgaatcaatagacaaacttgtaggtttctcacacccaatactgaggttgtttctctcaagaaccctaacgcgccctaacacattaggaactttagtaaaaaaggagttggcaagtggctatgccgggaaatgacactcatgcgtctggctccacaagtagactttctttgactgtgctacaaacccaacaacaccctaaccattgggctcactttttccgcagcgttgcccgtacatcatatgatgactacatgcaagaagcctggagcgaagtggtccagattcacacccaactccatctctgagaggaccaacgctctggtctcacaggtttctgacacaccgcctgtcatcagccacgagagaaacgcactaggctcgactggctacgttaagtggtaaatgatagatttccaggggaaaatatttctcgggagactgaggcaggaggttggcgagttctatagaagccatcttgggtaccctgtgagttcaaagccaaccagagctacacagagagacccgggtggtagcggtgtctcgggcggccgaagaactaatgaagccaactaccacaagacaagcaaagtaacgtggggcaggcagcgggcctaggcggtcctcggacggtccgttagccgggcgggcgaccaggctaccaggaagctcggatagcaagagagggcgctccggacgacgaccgccgcccgcagagggaggggaaccccggggggcgcgagcgcccgggctgcccggcagctgcgagagcgacccggccggcatcggcttccgcccggccgagaggcctagtcgctgcgaggcgcgcctcgggagcagcggcagccgcccggcagacagcgagaagcaggcggccccgacggccgcggagtgcagaggcgacgcgtactcaccgcggatctggcagcgccgcccagcgcctcctgaacgctgggggtcgcgagcggccgcaactctttagaaagaggagagcccgcgcggcggcgcgaggcggcaggggcggggaggggcggggcgaggggcggggcgcgcaggcgcggagccctgtgggccgctgtacgctcacacagttcctgggtccctgagtgctgttaagagaggggtttaggggaaaccaaagaaagccaatagggtccctagacacccttcgaaataagctctgctgcatcaagcttcctctggttaatttatttgcatgaatccaaaattacgttcaaattaaatgttcacatgactagttagaaactctcagatggtataatgttaattaatgtctgatcgtcttagcggaatttaagcatcctaaaacacaaaaatactgaatcttgctctctgctaaggagagattacaagagtggagggcgggtatgagagtagggggagatgagtgggatggagtgcatgatgtgaaatccacaaagaaccaataaaaagtaaaaaaaaaaaaaaattaaaataataataataatactgaaatttctacaacatatatttccttgaaatatatgctccagaaagtccatttccttgaggaggaaaaaaaaaaaaaaaggcaacagcagaaatgtcaaaggtgaataaaatatgaaatattcctacaataaaatttaacaaataaaactcaaggtttgatagcgcctaaaaaaatcttactaagctgggcgtggtggcgcacgcctttaatctcagcactcaggaggcagaggcaggcagatttctgagttcgaggccagcctggtctacaaagtgagttccaggacagccagggctatacagagaaaccctgtctcaaaaaaaaacaaaaaaacaaaaaacaaaacaaaacaaacaaacaaaaaaatcttactgaaggggctggagaggtggctcagtggttaagagtactgactgctcttccagagatcctgagttcagttcccagcaaccacatggtaaccatctgtaatgagatctgatgccctcttctgaagacagctacagtgtactcatatacataaaaataaatcttaaaaaaaaatcttactgaagccaggacttttatctcagaactcagaaggcattggtaggtccgtttccccacctctcccaaaaaggggatggtggtggtgacggtggtgggtagtctcactgaaattatagcaagccaacaaatgtgaacactctcatatgcttttcataagcttacaaaaagtagttcatagtttgtgggaaacagtactcctaaaagcataggttaatggaccagatgatagatggatacatcgtggtaatgataaagcaatgggaggaggagacaaatagaaagtggaataaacaggacctcagctaggggtcaaaaccaggactaacgacacatgccacaactttgactctggcccgagctgccccaagtaataagccaagcggggctgcattccacttggcagctccgctcctttatctgtatgtacttgacacgggttcctctccaacacaccctgcaatctcaaatcctccacccgagccagcatcaggctgtgcacactcccatctctgagcagtctctattttaagtgtgtgaccgatttattcagatatgaagaacagaaaggccgatctggtctgaactggtttttgtcttgcgaagaaccgatgctgccttctgcacacgtttattgggagagcttgattgtagaggcgaaaagacctcgagcccagaactggtgctgcttttataggcctaggaggggcgtgtctcacacccggattggttatgcactaagccttatttgcatgttcctcatctgattggctactctctctcagtaccttacagaacctcattatcatacctcatttgcatgtctcacatctgattggttatactctcagtaccttacagaacctcattatcatacctcatttgcatgtctcacatctgattggttatactctcagtaccttacagaacctcattatcatacctcatttgcatgtctcacatctgattggttatactctcagtaccttacagaacctcattatcatacctcattatcatgcctgggccaggcagtgtttttgcaaaaaactttactgcatatgtacacattggttgtttgtccaatcttatgcatggtggccatcagtagtcagtgccactcagcaacggcacatgtggcttcccacattttggatgatgtgaggcagaacaaactatctacagaactctccacgagaatcctctattaacttatgcatagttgtgtgtgcaaactagatgcagatacctgtcaatgcagggcctaatctaccaatcacaacagacaaccaccaactacagcccggagtaatcagcctgtcctcaagacccaagaaagacagaccccagagtgcattctgggtccttgagtgccctcactcatgtgatctactgtcaattataaccatgtatcttctgtaaaatgtattattgcttggcttcaagtaaagtttatctttttttttttgcaaatcaatctgtgcccagaagtctctctctcccacaggctcacacttggttcctaactgttttgtttggtgtgtttatttatttatttatttggttttttgagacaggatttctttgtatagccctggctgacctggtactcactctatagatccggctggcctcgaactcagaaatccacctgcctctgcctcccaagtgctgggattaaaggcgagcgacaccatgcctggcctctctagctggttttgctgttgggagaagtagtggaaactttagtgggtagagtctctctacaggaagtacagcactctggtgggctttgagagtttagagcttgccccacaccagttctcactctgcttctgcaagctgttgtgggttgtgacatctaagtgatgtctgatctgggggaccacctgctgccgtgcctccttcccactatgaactctcgctctggaactgtaagccaaaatcaatgcttctttctgtatgtcattcttagtcatggcgcctccttcttcagttctttggataagaggccttgtccctacccatgcaaccccaactgctagtgacacttacatcatgtaagagccccagggatcaaacactggatgtcaggcttggtagcaagcacctttacaggctgagccctagagcccttttctgctgttacgagtcagtttgtgtatctcagattggccttgaactcctgaccttccaactctatgtgccaagctgtggggtgactggcctatcccaccagctcagtcagttgtttctagtttcttcctctaagatgtctttaggaagataagcactatcactatagcaaccttggcttcttggattattttgaaattacccaactctgagtgaacaggaaaagcaaactagacccctgggtcaggggcttctgtcactccaaggtcgcctcaattttctgcctttttacagtgcctcaaagtgatacctaaagctaggcatggcagtacacacctttagtcttagtttcagcacttggcaggcagaagcaggtagatctttatgagttcaaggccagttgggtctacatagtaagtcccaggacagccagggctacataggtcctgtctcaaaaatataacaacaaataataataacaataacagtaataataataataaaactaatattacagcaatataaggccagcagtgccctattttacctcattatcatgtaaaacagtgttttgttttgtttcctaccgtgtaaaatggaccaagattccattttacaagcagcctgtgtctccaccttgagggtagaagtaaactgtattcctcagtggacccaaactcctatttgctcggcaccactcatcggcagagattgataaacgacttattcctgagaacagaggatgctacctcataaacttattgggaatgaactgagaacaagcccaagaacttatcagatactgcagaccaaggagaagctctaactctctcatccagaccccataaagtgaagatggctcccaacactagcctcaaatacatcatgacaatcctcctgcctcagcctccagagtgatataattacaggcaggcaccacatccaaccttattattgtctgggtttttgtttgttttgtgggtgtgttttgtttcgttgagagatgatctattattggagcagaggtttgtcttgaactcctggtcgtcttgcgtcctccagagtactttgaccacagccttaactatctttttctcgaacaatgtcttttttttctcaaatgtgcatttctctaaccttagtctcccaaattttggaatagcaagtatgagccaccgtgctcagccattagtaagtgcttcttagacagggtctcaggtagcccaggctggcctcaagctcctaatcttatatcctccacctcctgtgtattgagatgaagagctgtaccattatgtctgctttaataagctaagtaaaacatttctagaatctgggtcttaggttctcttccaaagaaatgggagaaattgccgggcatggtggtgcatgcctttgatcccagcactcgggaggcagaggcaggaggatttctgagttcgaggccagcctggtcttcagagtgagttccaggacagccagggctacacagagaaaccctgtctcgaaaaaccaaaaagaaaaaagaaaagaaatgggagataattttccacatatagaaaaaggaaatgacaagtgtccgtcagtggctcaccttgagcaaaactgagagccctgagctaagaagtgatcaacatgcaccgtttttttccaattcactggactcctaaggcgccagaggaaccaaaacaaaatgagcctctgggccccgcctcctctgggccccgccccctcagggccccgccccagcgggactctgcagagcccaaacttcgcgagagttgctggccgggtcaaatccccgcccacccactgctcgtggtagcaggccgcatgcgcagcttcttaacggcgcgtcttgccggaaagatggagtgtcctgcgcccgatgctacggatgctgcggaccctggagaagccggaccgtacaagggctccgaggagccggagggtcgggaaccggacggagtgcgctttgaccgcgagagggcgcgtcgcctgtgggaagctgtgtccggtgcgcagccggcggggagggaggaaggtgagtcgggggctccggggttggcggctggaccgaggcgggatgggatggccctgcctcctgtcactcccctggcgcccgccagcctctgcacgacgttccggagctgcgagctcgctctcgcgaagggtgctggacctagtaactcgttaccctgcggaatttgtccgtcctcctttccagggcgttcacttgcgaacagtttccccccattctaggtcttgtcctcttagacagcgacaggactttcccagcctgactcgtaggcgagccagcccccgtccctgtctgtctttaattccacaactccacattgcttctctttcctctcaaagccctatggttctgacagatccgaatagctttatttaatttacttcattattattacatttattttgcgacgcctctcactgttccaactcgtggtggacctcctgccctcatccttcctagtgagagggaggaccaacgtgagctctggaaggtcttcttgaatcccagctcctgggcttgatgactgcgtcctggtttgccatgtttcttccttggtagacttggctggccttgaacttgcatgggtctccctgcctcagtgtgggcatcgctggcttgcaccactatgtccttcaaaaccgtatttctgtgtctgttgccaacagctttttccactgaggaggcccaggaggcggggaagcttaggtattcatcttgcctctgactgcttcatctcacactcgatgcagagttgtggagaacagtgtatactcactcagggtgcacttctgggcagaaccttaccagatggctctgtttgaaccaaaactgggtgggtaacaaggatactagaggagtgcagggcgagctggcctctttctcttttcagagtcccttcccgagctagctacttaatactaacccaaatgtacaagaactgttatctgggtttctgtgctaacctatcaggtccctgcagagaagtctttccctggttattttgcttgctgagcagactaatcttgggaagtttaatgtgtttgtgaactgcttgccctggataaaattgggattttttttttttttaccatattaaagggagatatatttaaatttttaatatgtttttattttatgtgatgagtgttttgcttgcatgtatgtgtatatgaatgacaggtacccaaagatataagaagaaggtatcatatcccccgaaactcgaggtaccattataagctaccatgtgggtgttgagaactgaacccctggttctctacaaaagcagtacatggccttaaccactgaaccatctctctgaccccaagatacgtcgaatttaagtgtatgcatccccaatctaatactgttaagtctggctcctaataaatgtatatgccatttctgagtctctacttttgtacttttaaacatttttttgagccagttgtggtagcagatacatgtcattttcagcactcaagtggttgagataggatcaagaattcaagccagcttcagctatatactgagtttgaaccaggcagttctggcacatgcgtttaatcccagcacttggttgagtctcttagttcgagggcagcctggtctacagagacagttccagaacagccagagctacacaaagaaactgtctcagggagggaaaaaaagtttgagagaagcatgggataaataagactcttgcctcaaaaaaaattgtagtacaaagttgtctccttgacccagatttcctttcatgaatttgacattcccagggccagctggacctcagagccttagggatgaagacgatgctgttcttactctggagtagcttgcagtccgtcctggaggcaaacaccaaaacagttgtataactttcgttttttaaattttacttttaatgatggttcttaaatgttttaacctcccttgtaacccaccacccaccaaaggtagtggaaaagaaaggatacaggggaagtggacgggtttagaaaggttctttggaacaacgcctgtctatgttatctggaaatcagcagttcagttcacaggttagcagtcgacagcagctcagtccacttgcaaacacgtcatggatacaccagccttccagtctggtagagtcgggttagcaactgtggtgacacgacctagcagagacagccaggcctcagcctcggctcgagtcagcaggagggacagcagggacaccagaagttctcagctgtgcctctctcagggaatcgaagatcagtgaagacaagagacctacaaacattgcagcttagctgtgccagcaagccaagctctgtctccatcacttgatagagtcctatttatagcctcccaacatcatgtgtcctccacgtgccttgcctcagcacgtgcatccaagcagccagagtctgaggagtcctgacagatgcagctcaactacacagtgtaaggccgaccaacacatgtgagtcattagcaaagaatctttcatcatgagtcctttcacgtgcttgctttagctgaacatcctctctactgtgtctgcttcagcaaaatgttccttcacgagtctgccttagcctttcacctgtgtccacttcaggaaaacactccttcatgtgtttgccccagcaagacactatgcgacacaactaactccaaagaacccttaaattcccacttcacagttattgtataatgtaaggggagaagggaagaggggtgcctcagaataggagatgcagcaaagggcagtggccttggggaagtgtgccctggaccttaaagcagagaacacagcagctgcttacatacatgtgagcataataattagtgctcagttcgtgtccctgttgaaagttctccagtcacacttagatacctccagcacttacattctaattataaaatgtgtgtgcccatgtcagagtacatacagatgtgttagatcccttggaactggaattataggcagttgtgaaccaacatgagagctgtgaaccaaactcaggtcctctagaagaaaaaaaagcacatgttcttattggctaatcatctctgcagccccaactcagtgacttttttctttttttttttttagatttatttattttatgtatgtgagtgcacactgtagctgtacagatggttgtggttgttggggattgaatctttaggacctctgcttgctccgatcaactccactcactcagtccctatgtgctcaggcccaaaggttcatttattattatacataagtacactgtagctgacttctggcacaccagaagagggcgtcagacctcattacaggtagttgtgagccaccatgtctttgctgggatttgaactcaggatcttcagaagagcagtctgtgctcttacccgctgagccatctcgccagcccctgactttttttcttatgtgtatttagagagtatgtggtaccatggtgtgtatggaggtcagagaacaacttgcaggagttggttttctcctttcccaatgtgggtccttgaagatgttacattggctgacttggaacactctgggtagaccaggctgtggcctcaaactcacagaatgctgggattaaagtcatgcaccaccatgtctggctatcttctttatttcttcttacatttatgtataagtgtgtgggcatatgggtgtcctagcactcctgtggagattagaagacagcctggggtaatcagtgctttccttctacggtgtggagctcaaggattgaactcagcagttcagatcagccttggcggcagcacccagcccactgagccatgtcaccagctcttgtgtgtgtttataaacagtgccttttgaagcacaatcagcttctagtgcacgaaagagcgtgtggtgcttgttttctttgcctgtctgctctcacttaaaatcataccctgcagttccattcattttgctgcaaatgacatattccaccgtcctttgtggctgtatagtattctactggatatccgtaccgtgttgtctatattctttttattttgtttatttgtaagtgcacactgagtgtggacatggcctagctgctgaggcggtttgacacaggtgcaggagcactctcctttggtcaagtgggctgcaggaatcaaactcggagtcttgataggcaacgggtgcctttgtcccctgagccaaaccatcagtctcacgtctgtgctcattcttgtgactgacttcatagttcagatggccagttgagctacttcacacatggtcaggcagaggtctcaacatgctagtttagttcatttttttaaagtttatttaattgtttccaacaactcttgttggcattttgtatcagaatagttgtacttggagctggaaagatggctcagtaggtaagagcctgtcttgctcttccagagggaggcaaatgtagttaccaacaaccacatcatgtgactctcaacacaattaaaaatagcaaaaaccaatcttaaaaagaaaacaggccgggcgtggtggcgcacgcctttagtcccagcacttgggaggcagaggcaggcggatttctgagttcgaggccagcctggtctacaaagtgaggtccaggacagccagggctataaagagaaaccctgtctcgaaaaaccaaaaaaaaaaaaaaaaaaaaaaaaaaaaaaaagaaaacagttgctctgtgaggttctagttctctggccccaaagagaccagcagagagaaaaacacaagtcaggatgtccactcataggctcaaaaccttacctgtcagtggcaattgagagaagctatggaagaccagagtatgccagccaacagactaaagaactctcatagccagttatggtggccagagtaaaatccctcccaaaacaaagtttcaaaatcatgtaaaagtttaaagaattaaggtttagagctggagagatggctcagtggttaagagcactgactgctcttccagaggtcctgagttcaattcccagcaaccacatggtggctcaccaccatctctaatgggatctgatgccctcttctggtgtgtgtctgaagacagcttaagtgtattgtattgtatataaatacaataaaaattaagttttatatatgaaccatgcaagacttcttagcactgatgcaaagcccagcaatgacactgcagttgcacaaagtggaggggtgggttccatgctgctaaatcagtggcagaaaggctcccactccttccccctgcttggtctgtctgtatgtgtgtctttctctccctccctccatctgtcttcgccctccccaactgtctctctttctccccacccccacccatgtgtatgtctgtctgtcccagaaggagagcacttagtgcctcggcattaagggacacgtggtccattttgtgagcagggaacagggtagagatgagtaaagttctgtcttggagctgggctgagtggtaagaagctcacctgacattcacaggaccctaggtgttgggaggtagggtatcagctggtctaaccatcttgacttggttgcatctgatgaaaaaagagaaaagtaaagatgaagttattcaaatacacctaaaactgaaagcctcacagctgggtatggttcttggtttggtcagtttcctacactcttcctgttcagtaggactccacagcacagtgaggtttcctatagcaggagatttcctaggctctactggctctcagcaatgcagacggatgcttgtggagagccagccgtatacactaacctgaaagttaccatccaaaagtgagggatcagattgccgctttcccactttgcaattacttggaatggttgttatagccagatggtgccccatacctttaatcccacactaaggcataagcaggcagatctctgtgagttcaaggctagcctggtctacatagcaagttccagggctacataataggctagaaaattggctcaacagtcaaaagcattggtttcttttgcaaagtacccaggttccatttccagaacccacttggcagttcacaactgtctgtaactctgtttccccgggatccaataccttctttataatggcctccatggtacacatacatgcatgcaagcaaaatattcatacacgtatgtaggcttagattttttgaaaacctactttaataaaggttcttaaatgcttaggccttctttctaacccagcaaccaaaggtaagggagaaagagattactaggacaagggggatgtggacctgtttagaagtagttctttggggcgattccaatcttcattgtcaagatatcagcagtccagtccaaaacatcaaacacaaatcaatagcagtagctaaatgaattagaaatcacaagagtcctcataagtgtcaggaagcagccagaataccacgagaagttcatttttctctacaaagtcacgacaagggaatatcagtgaagaccagcagagcattgcagtgcaagtctatgcacaagcacctttcactatctgctgtgttatacttacgctctctgcaaacatcacacatcctttcaagtgtctgcctcagccaaacatcctctcaatagacctcgtccaggaaaacaccacatgacacaaccgagtctccaaagaaacctgaaattgccccttcacacatgaataagtaatttttaactcaagtgttcagctgtctcataaggaatgcaaactcatgccttaggtgtgtactgtccttttccaatacctatctctcctctaatgcttaagtctatattaaaactcttgtaacaaaagaaaaaaaaacaacaaaaaaaaaaaacaaagccaggcgtggtggcacacgcctttaatcccagcacttgagaggcagaggcaggcagatttctgagttcgaggccagcctggtctacagagtaagttccaggacagccagagctatacagagaaaccctgtcttgaagaaaaaaaaagactcttgtagatgtcattgttatttcagacaggaactcattatatagccctgtacagccttgaacttaactacatagactaggctggccttgaactcaggttcccctggctctgccacttgagtgttgttatttaaagtgaacatctctacatcctgctttaacaccacttcatagtccccagatacaccagatacacttttttctaaaaactgacggtgcatgatgttatgggtctatcgttatacctacgaaggcagaaggatcgcttgaggcaggaattcatgggcagcatgggacaacctcatctcacataacaacagtatgactaggtaaagagcattggcctgtatcaaatgagcaataatgcaggaggtttgtaagcatagcaggagtcatggcacagtggaactgaagggcagatctgcatacgtgttagtatggtttccattacttggtgtctatgatagatcagagacagtgctattgcgatcacatctgtcaacctacatgatttcttttccctctgtagtggaacacatgatccagaagaaccagtgtctcttcaccagcacccagtgtaaggtctgctgtgccatgctgatttctgagtctcagaagctggcgcattaccaggtaggcaatttctactgtcttcgtgcgcttaccttccaggcccagcactaaggcctcgctgcttctgccttacacagtagaagctccttgcacagttaccagatgtttccttcatacgtgtttgctagggcttgaaattgacttagtttctgtgactgtcatctcgcccatgcaagacagtatcgttgtatgcagatcttgccggacaacgtgatgcagtaggaagtatgagctttggctttacctagaccggaatttgaagccaaccccgttattcattgtaggcaagaaatttcaccatacttggccttagcttcatcttgtacacaataacagtgttttcatagattgttggaggctaaatttaatagcatgtaaagggcctagcacatggtagggactcaataaataaagttttcttcccccattttctcttccttagaagtttttgtgaggatgaatcagtaagaatctggtatggcctgattgtcttccctatgaaatgatgtttggctgtctttttgctgggttcttgcagagcaaaaaacatgccaacaaagtgaagagatacctagcaatccatggaatggagacaataaagggggacgtgaagaggctagactcagatcaggtaacacagccgccttgttgacactgcttgcttcccgggcaggtttgtgtggtgtgagtgtgggctttgattcagactgacttggctgcaaatcccagtgttggtatctaacttgggcaagtcttataactcttcagccttgatttcttcctctgttaaaaaccaagcatacttctaagcatggtggtgtgcacgtgtaaccaaagcacttggaagtggaggcaggaggatcagcagtgtgaggttatctttggctgcatagcaagtttgaagccagcctgggctacatgacagactgtctcaagacaaaaaacaaacaaacaagcaaaaagtatagctacctttcaggatttttcctaagttgagaaaagacttataaaacagtgccagactcaaaatccgtcatgtagcaacagttcagtaaatggaccgttgttaggctccgcccctaccacccagagggttatccaagtggacagagtaaagggacactgctgttcttgaactgtggagaaaaacgaagttcagcatttacttgacaaatgaggacaataaatgccttctctgacacaacgcagtacacttactttatcttagagttgctgtaagaattacagagaagccagccccagttcctaagtgtgctgtgcctttcagagtgtgggcattctgcacaacatggtgagaaagtcggtgggcaaggctccttaacgtattagataggaaaccttgagcaagtcaccttatctctcgggaagtcactcatagcttgctcatgttgtgaggtaaaacttcagtacccaggaaatggtcagtaactacgagattgctctccagactgctggttcctgttacagtggccagtggtttaaaggggccttgcgtgcccctttcagaaatcacctcctgtttgcccttatggtttagatccacaggggcacggtcatttcacctttctgcttcagttagatgactgagtagctaaggtgagatcacagcacccaccaccagctaggaatcgccaagcccaaaccatctgcagtgtgaaggcagaaaaatgttgaagagacaccttgttcagcggacattcttttgaaatacactttctagcataactatagtaacaagtagaacacactgacgtgttttttctaagagccttgggtatctactgtgtgctagacacagcagggtacaagggtaggaaacaatgagtcaagttatccacgtccagcattgcacttaagctcacataaaaggctcctcagctgtaatgctgtccgtcaggtgacaaaggctgtaatagtagtctgatacactctgggaacacaggtgaggaacaaccttaactcttcctggataagcacagcacaggccttggtaattgtgtaccaatgtttttaaggtaaaagtcactgaatggctgatagcagacctaattaatgccaggcaggaataaggaggaacattctagagagtaggaataacccaagaaaattgaggaagtgacagaataaaatgggaaattatgcatggagcctgacgtgaaatagctggagaagactctgtaaaggtatgtttcagttatgttgtgggtaacatgtgaaggtggtcttaaatgtccaccagccaatgggcagtggggaaccattggaggttttctggatgggcactggcatgatcagacctgtgttctctctcccaaccagaagagcagcagaagcaaagacaagaaccactgctgccccatctgtaacatgaccttttcctcccctgctgtggcacagtcgcactacctggggaagacccacgcaaagagcctaaagctgaagcagcagtccactaagggggcaggtactgcgcttcctgagtagtgcttggggaccccctcccattctcagggcaccattgccagcagtctactaagggggcaggtactgcgcttcctgagtagtgcttggggccctcccatcctcagggcaccattgccaggtgcttccagaatgctcactggagcctcggaatgcagactgggactcagttttcaggcttttgagagttctgaaatatccaagtatgagttggagatataagtcagttggtggagtacttccctagtgtgcacagagaatacttccctagctttcatccccagccttgcataagccagatgtggtgcacactttcagtctcagcactcacaccatggaggcagctaccatatggagtttgagcaacctgggttatgtgagagcctgtctaaaatacatacataccataatagaccctgctttactgagattgggcctcagatgtggttcactttacttccttttgtgtgattctatcagatgttatatagaagcttcttagcctataattactgtcctgagcagtaattgtaactcaggagggccaagggcctgctgcatactgtgagcattctgctgcctgcctccctctacttattctgtcccaccacccacctgttcttactgctaagagttgccagttgatagctaaatcatcctcacagactcaggttatgccctgctcactttgacctgcaaaggctgcctgttctaaatgcaggcttgccttcaaagcaggctactctagcaagctgtttgcagctgctgtgaatccactccccagcactgacttcacattcagccttctttgttctctcgtcgttggtacagccgtcactttcatcctgttaaccctgaatcctgaggtttttaacctaggctaactgcagttagtcatgagtgggaggccactggtgtgcatgcatgtgtgtgtgtgtgtgtgtgtgtgtgtgttcgtgtgtgtattattctccagtttggaccaagaccacgctagtaatagaacttttgatccttttgttttatttcatcactgaagcaagacaacagtgtcttagaaggttttggagatatgatggaaaagtctactcatagttatacccaaacgtagttattcatggtctgaaacagtagaatatagattgagtcagagcagcacagacttaagtcaggcgcttttctttaccatttgtgtctgtaccctctgcacctgtaaagtgtcagtgccacctgctttggagcttgtgaagatcattacggctgccctggtacacatcgccattcccagcatgggaaagaggaggcaggaaggtcaggagttcagtgccactttggctgccagctttgagaccagcctggcctatatgacacccaaaaagataagaggcaaacacccctcactcaaaaaatgcctagggtacagcagatagtcactgaacagctgtcatcactgttgttaccattaaaaagccagtgcatggagcctcttgtaaaatgcagtcattaatcaggaagccacccttgcaaccttcctaatgctgcggccctttaccgcagttaatgtattaaacaggccctcgagttgtagtgaccgcagctatgaaattagttccgttcataactgtaatttggctactgttatgaatgataatgtgaatatctgtgttttccgatgcacttagatgacccttgtgaaaggggcattcagtcccaaaggggtcatgacccacaaattgagaacccctgatctagagcctgccatagaccttgatcatggttgacctgttgactatggtgagtattgattgatttttgtctacgctgagaacctgtaaacagcacatgacatgtgagcattaggccaaggaaaatgatcttagctgagtttctaatgccacagacttaccttcccatggtgggaaaatttggtggaatatgacttctcctaatacttctgttctaaacagtaacttatcttccatattcacgtccagccattgccacatgtaactttgtgttgcaattagtgcatcaaccatgtgtattctgctatcacttttcatttagcctcatagtttaaagatacatccatattgttcatgggtttactataactccaatcctgaaactgagcatttgtgtgctatgcaagtgagacaaacatgctgtagaaaatacagagaaagtgccaggaattcccataactttgccattgcagactaggtgatgttaacctagagtcctgggttcttacagccgtgtgcaccacgtgtgtttgtgtacctgcttgtattatgtttgtttgttttctgttcatccaagttgactccatatagaatatataatttctgtttctgtaaaaactatgcacatatgtgaataattccaattcaacatgcaaaacattcaaagaagcagacaatattccacccaagtcttacttctagggagagcattgtcagcagtggctcctgcttataggcatcctggctacaagcaagttcaagaccaaccatatgttacacgacatactgtcatgcatacgtgtacatatgcgtgaagtgtatatgtgtatgtataggtgatatttttaaatgctagtatacttatataggttatacaaaaaccttttaatactgatatgactatattattataatatattaaaccttcttatatatttcttcatttaatataacatttcctcatgttggggctagagaaatggctcagcagttagaaatgtgttctattcttgcagaggtcccaagttcagttcccagcaccagtgtggggcaactcataaccctggtaactacagctctagagcagtccatcactctggcttccagggcactgctccacatgtgcacgtatccatacaggcacaaaggtcagagacaatctttgatagcacactttgtgtatctcaagtatttcttaagagaacgctctagctctcgctggccctgggtgtctgttaacagctgctctggcttacagctcactgcgttcctcccctccaatgcggtctttccttaaacaatagtatttattttttatgtatatggatgttttgtctgcttgtatgtcactatgtatgtgcactgcccacagaggacaccaaatctctaggactgagtgaagttgcaggtggttgtgaagccaccatattggtgctaggaattgaacccaagtcctttggaagatcagtcagtgctactaagcactgagccatctcttcagcctcaccctctagaatgttttaaagaacaaccttgggcccacaagatgactcagtaaatcacagtgtttgccacacaaccctgggggcctgcgtctgactctctgaacccatgttgaggggtgaggagagaactggatcacaaagttgtcctctaacttccacacatgtactctggcatgcacactatgtgcacacacctatgactgcacaaacacacacacacacgttcaataataataataggttaaaaatgttttaaagtggggactggagagacagctcaatggttaaaaacactggctcctggttcaattcccagcacccacttgtgtaactctagccccaaggtatctgatgccttcttctggcctctgtgggcactaatatacattcaggtagacatacacataataaatagatgaataaaattttcaaaataatctaaaaagagtaaaaaaaaacaaaacaaacaaaaagccaggcagtggtggcatacaccttgaattctagcactcatggtctagagttcaaggccagcttggcctatagagtaagttccagaatagccagagctacacagagaaaccctgtctcaaataaataaatagataagtaaagaatttgaaggggcaggacgcgagcaaacagctcagcaggtaaaggtgcctgctgacaacctgagttatccctggactcacgtggtagaatcaccatgacgagactacctgcaggtcagcctttgaattccacatgcacacataatgaatcaatagaatataataaaaacttaaaaagaaggatcttagcttttattagtcccagcattctttaggctaaagcaggaggatcttgcattagatatgctatctcaaaatcatcatcatcatagttattacaagccagacatcatggttcactcctataatcaatacgtggaaggctaaggcctgaggattacactaagtttgagactggcctgtctccaaaaacccttgctatctaaatgacttagttctagatttctctcagaaatctacatcaatttgtaagaatagagagtgctgaagacacactcctcactctgtgattttgcatctcccacacaatcatgcgtggttttggtgttttgttttttatgtaagtgaagctaggcatggtagtacatgcctataattccagtattcagaggcaaagattgaggagtgctgcaggttcaaggccaacatggtctacatatcaagttctaggtcactaggggtatatagtgagaataaagatgaatctttctttaaaactgaaaccagttaatcagagttatccctggactcacgtggtagaatcaccatgacaagactacctgcattcaaaaggagaaagaaagagtgcatatggttatgcactcctttaatcccggcactcagaaggcagaggcagatgaagctctgagttcgaggccagcctggtctgcaaagctaattcaggggcagccagagctacacaaagaaaccatgtctcacaaaactgaaaaaaggaaaaaatgttttataatctatttttttcaactcaataccacaaactaaacactctcgtgaactattttatatgtgcttcactttctgaatgacttgctgaaacaaagcccgtggccagagaaaatgtgttgtgagtgttgtctggcttgctacaaatcctcagtggtaagggaaatggtaagaggtgggaaaggacctgaaagccctttatgagctctgctcacctgcatccttctctcccacggccaggaccaggggtctgggccctccacgtctgcagtagtgcctgtaaggttaataccattcaaactgaccacgcaaatttgttagtcatggcatctactctggaaagcagctatctggcccgctttaaacattagcaccaacatcagcactcagaagacatacgcccataccagactctgattaactggtttcagttttaaagaaaagattcatctttattttttttcattttatttttttaatatttttattacatattttcctcatcatctttatttttaaaagtgtgtgtgtgagccaggcgtggtggcgcacacctttaatcccagcactcgggaggcagaggcaggtggatttctgagttcgaggccagcctggtctacagagtgagttccaggacagccagggctgcacagagaaaccctgtctcaaaataccaaaaaaaaaaaaaaaaaaaaagtgtgtgtgtgtgtgtgagagagagagagagagagtgtgtgtgtgtgtgtatgtgtgtgtgtgtgtgtgtgtacgcgcgcgtgcgcttgcctgcggaggccagagcaatcggatgcccctgtgctggagggttagaggcactgtcaagccacctgacaagggtgctatgaattgaagtcagattctctggaagaacagtaggccttcttaaccactgaaccaagtctctccatcccttgactaagtgacttctctgagcaggatcggaacgttttctgaaggcgaaattggcagtggtagctggcagatccacttgcttctgtcttgagccttggggtcccacggtctagaagtctctcactaacttggtgatcttgagcaaatcagttttgctgtctaagcactggtcttccctgtgatatggcaaaatggtacctccttcattggagtacttctgagaacctaaagggaaactgtgattacaaaatgtgtcttgtccctcacattggctagaatttagtatggtctaacaggcatcttggccaggtgtggtgacacacactttaatcccagcctggtttatatcttgaattttagaccagccagggagctacatagtgagaccctcagaaaaactacaactaaataaataatagaaggcattcctaatctgcttgcctgcttttgtttgtacaggctcagagcgccaatgcctacttcagctctataataggtatttgaggatggagatgaaatatttttatccttcttatcctacctgctttgaattccatggaattctgaggtctagagactgcaagtatacaatcagggaactgagtagcacaatgagagcctcttcagggtgtgaaagccttagggctcccgtgcctagtgctggtgaacaagtcagttgttcatggagctcactgaggtcttgccactgttgccacctagagcattcatggtgtgactattcacagcgtgactttgaggcagtgtctcatccctctgtggtgggtggcactgccttcctttctcttgaagtgtactcaaaacctggacgccttctggcttgttgtttcattgtttctgtttgaactctcttaccacagctttgtcgaaacaccttacaaatcctttccttgtggcctccaccttagccttgcagcagaatagagagatgctagacccagacaaattctgcagcctctgccattcaacattcaacgaccctgccatggctcagcaacattatatgggcaagagacacaggaagcaggagactaagctcaaactcatggcacactatgggcggctggcggaccctgctgtctctgacttaccaggtgagaaggccccactcatgtgcagagttggaccaggaactgagcactagattccctggacgccccagagaagtactgtttgttgcatattctaaagcagggtttgcaagcacagggagcagacaggcaagccagacaacatttgggaggttgaagcgggaggaacaaggtcaaggacagtctggaatacatagtaggaacatgtcttgagaggatgctggagaacaaacagaaatgggatgacatggtccagagacagcatgggcagtggaagagggttaggcactcctagcctacaccagtgttgctacctttcagtcttcaaagttctgtggaagccaggcatggtggcacatgattagtgtcagtactcaggagatagagataggtagatttcagtgagtgtaaggctagcctggtctacataacacaatccaagacagccagtactacatagaaggaccctgtctccagaacaacaacaacaaaaaaaacaaaacaaaacaatagaaacccaaatttgtttgggagtttcttgtggtttcattatcattagctccatttcaatgctgggacgaaatatagggcctgtacatgctgatcaaccattgccactgaactacagtctccactaagattcctcttagttttcaatatgtgactaaagtttagaaattttaaactctgagtaaaaccctctctataagtcagattttggtcaaaagtaccagttttttgtttgtttgtttgtttgtttttagatttatttattttatgaatacactgccattcttcagacacaccagaagggggcatcaaatcgcattacagatggttgtgagccaccatgtggttgctggaaattgatctcaggtcctctggaagagcagtgctcttaaccactgagccatctctctgccccaagagctaccagtttttaatctctggtttgaaggagttttggttttacttttttgaaatttattttttggccagttagtatgcacttatatatcttagcactcgggaaacagaggcaggtggatctttgagttcaaggacagcctgatcttcatacctggtagggctacacagaggagggctgggggagtcaattttaatcctgtatgtctgtgggttcgtaagtgcaggtgcccatggatgagagaagagggtgttcactccctggagctggagttacaggtggttgagccatctgacataagtgctggaatctgaactcgagtcctctggaagaacagcaagtaatcttaactgcctagcatctccccagtcctgactctgatccaaactaggttacatccacattgctagattgaaggcctcaacagccttaccagagtttgagcatgtttagggcatctctttccacagcatttgatacctgtatccctggggtatcacagtgaaggaggtggctatcctagtttccttaacctcaaaatgtcacttggcggtgctggagaaatggctcagaggttaagagcactgactgctcttccaaaggtcctgagttcaaatcccagtaaccacatcatggctcacaaccatctgtaatgagatctgacgccctcttctggtgtgtctaaagacagctacagtgtagttacatataataaataaaataaatctttaaaaaaaagtcacttggcatcacaagagtggacattcataattaaggaaccttcttagtatgtttggagttggaaatgtcactccattgctggagtatttgtctaacatgcacacatagcaatgccttcactggccagcagcacatacgcatggcacaatagcacatacctctaatcccacgtatgtaagcaatcaaatcaataaaaatgtgaaagcaagctgggtgtggtggcgcatgtctttagtcccagcacttgggaggcagaggcaggcggatttctgagttcgaggacagccagggctacacagagaaaccctgtctaggcaaaaaacaaaaaaacaaagtgagagcaaggaagacaatcattcttgtgatgactgtagcacgccggtctgtaagctcagagcaggtagggctgttttagtttctttggtttggggttgggatttagggattgtttagttttgttttctgagttttgttttctgatacagtctcatagctcatgctggccccaaatattttgtgtatccaaggataatgaacttttgaccttcctgcatctgctcttttttttttttttttaatttatatgagtacactgtagctgtcttcagacacaccaaaagtgtacatcagatcccattacagatggttgtgagccaccatgtgcttgctgggaattgaactctggaagagtagtcagtgcttttaactgctgagccatctctccagctccccctgcatccactcttaactgcgctgattacagggctgtgccgccatgcttggcataaactcagccaatcagtgggaaaagaaacaaaacagtctggacccaaagtgacatctccattctgcctctatctgtgagctccggaacataggctcagtctcgcaggtcttcaggctcctgagcaagtgccatttcctgcttagtcagctcacttcccctttgtatcactaaatgagtattacttaatgttgaatgtgagggtggcctttggttttcctccagtgctctgtccctgaaagtatacccagcctttctttatttcttagcatttaactttatatgttgtaactgatcgggatattttcgtcaacttgacacaggaaaaatctaagtgcaggactactaacattataccaaggcaattataaggaatctataagaaatctgaactcagtgagtgttagactgctagttaggtgaagagcagacagtctgcctcaatatggttctctgtccctggcagaggtctgtctgctgtgaatcagtgaagacagtatgtcccttctctctgctgtgcattcctattgaccccacaacacacatcagtagtcagatctagggagtggttaggtgaggggacacctacctgccaagtcctagcatgcacaggcctacagcaggaaaggcctgggtgaggtggtatctgcctggacccagcagttaggacattgaggcatggtggtggtgagttccaggcaagcctgtgctgaggaaatagttcaaggccagtctctaaggcgcagtctcagaacctaacaaattcagtaaagtgttgtgataccataaacattaaaaaatctagttttcgctaagaaatacatcaagaaagcaatctcctaatagctataaaaatgaaaataaaattaagaaagtgaaagctttctttaatgaaaatcataagactgatcaaagagattgaaagggagctagggagctggctcagttgtctcattgcctgccccacaagcaggcagactctagcacccacatggatgctcactgatggtgcacatctgtaccacagtgctctggggcagacagctggatcctggagcttactggccagccattgttgtcagttggtaatcgctaggttctgtgagagaatctatctcagagaatagagagagctacagaggaaaccacctgatgtcagcctctggcctatacacacatttgtgcacacagatacacacatatacattgtagaagaactgaacagggtgacacacaactgagactgaggagaattgcctcagcttcaaggcctgtctggactgcagtcttgttgaatgccagcctgggcaagaccctctcccaaaaaacaaacaagtactaccatccctaaaatggggatatttcctgtgttggtaaaattagtactaaaataccaatagtacagccgggcgtggtgacgcgcgtctttaatcccagcacttgggaggcagaggcaggtagatttctgagttccaggatagccagggctatacagagaaaccctgtctcaaaaaaccaaaaaaaaaaaaaaaaaaaaaaaaatacccatagtactgtaaagtggtttgtgtatttagaatatttcatatccagatgccagtaacagtagagaaatgtcctgtagtgtgtatggcatcacatgtgacttctagcagcaaaggcagtcttggaaaaaaaaaaaagagcaaaacttgaagcattgtaaatactacaaagttgtattgaaccaggcattgtagcactcatcttaatcccaggacttgaaagatcagaggaggaagattgggagtcaaaggtcatccttggctgcagagaggatcgaggtccgctgagttacataagacccccaaactgcccatcatctgtaatccagtacttagtgggtataggcaggaaaatcaggagtacagtgccagttttacaaaatagtagatttcattctgacatttttatgcacaaatcattataatcctttaatcctccttgcatgtaccaaatactttttcattttctgttttgttttggtttggtttttggttttgtcttttttgagacagggtttctctgtatagtcctggctgtcctggaactcactttgtagaccaggctggcctcgaactcagaaatccaccagcctctgcctctgcctcctgagtgctgggattaaaggcctggctattttgttgtgttttatggggcagagtcttatacagctctgtctgtcttggaacctactctgtagatgaggctgccctcaaactcacagagatccacctgcctctaccttccaaaggcatgtgccacttcacctagctcaagtgacttttttttttgtaataattttagactgttgaaacacatagtaacagtaatgcattttacatccctggaactcaaatctcagagacactccattttcactcacaagagaaagtaagctgtgtgcgcagggatctcaccacagagctgtgaggttgaaggtgacaggtggctcaaaggcaccagagccacaagaaccttcaagatatctgaattctgcttatcctacacaggataaataagtccaaaataagtccacccttcatataattggtcaggttggctactttctaccctgtcctgttttttatctacatatatattttttctattccatatatacatatatataatgcagctgctattctcataggatgtgaaataagctaatcatgatagtacatgctagaagtcttgacacttgggacgtagaggctgggggaacagaagttgaagcctaacctgaactatatgaaatgctatctgtaactttaattttttttttcaaaaataactctggaaaagttttattaaaggaaaacattcttgttttcttctcaccagtctgttctggcgtgctcctaatactgtcagaatcacctgggtcagtgatagccagtgtgcgtacgctgtagtgttttccacaccctgtgcccagttcagtattattgccactgtagtgatggacaccagttttagtccacatggcatagaactctatttcagatttcctcaaagctgggcagctgttggtgaggataaccaactttgctttgccctgtctgatcatcttcagagtctgtttgttccctggcacgtactttccacttttcataacaaactggagcctagagttgaccgactccagagactttttcatcttctttgtggccaccatcttcctgccttaggtgcggggcaacccccaaccaagatcagctgccaagacggctggggagtgagaaaggatttttttttaattgtatttttaatgatggttcttaaacactttaacctcccttgtaacccaccacccaccacaggtagtggaaaagaaaggatacaggggacgtggacctgtttagaaaggttctttggagcaactcccatcagtgttgtctggaaatcggcagtgtagttcacatgttagcagctcaatccacttgcaaacacctcagggatacaccagcagtccagttctgtagagtcaggttagcaaacaggaatcagcagcagtggtgtgaggcagcaggagggacagcaggaacactagaagttaagatgcgagacccacaagcattgcacagcctgctctataagcaagccaagctcagcctgtcactgcttgtcaagtcctatttataccctccaaatatcatgttcgggtcttgcctcaggatatgagtctgtctcagctggcaagaaactacagcacacaaccagaagttttttggtgtgtttctcactatggagtcctgacaaatacagatcaactactcaatgtaaggtggaccaataacatgcatgccgttagcgaagaatccatcacatgtcctttcatgtgcttgctttagcagagcatcctttctcctatgtctgcttcggggaaatgttccttcatgaatctgccttagcctttcacctttgtccactttaggaaaacactccttcatttgccccagcaaaacaccatcaaacacaactgagtttccacttgaactatctcaaaagaaattgtaagaaatacatgacagacatttgatacatagtaattgctttggcctggcgtggttatgcgggcctataatcctggcactcaggagaccaagaaaacaaaatcaccatggctttacggccagccagagctacataatgtagtgagatctcatttcacaaataagataataagagccctagagagatagctcagcagttaccaccacttgctggcattacaggtggcttataaccacctctaactccagttccagagtatatgacactcttctgacatcttgggcgcttggacatatatgtgcatacaagcagacaaacacatatgaatcaaaattttaaatcccagggcataactattttaccctaagtattctgagtatagagagtataataagtgggactggagagatagctcagctgttaaaagcattgactgttcttccagaggtcctgagttcaatttccagcatctacatggtggcttctatagttggatctgatgccatcttcaggtgtgtctgaagacaactaattatagtatactcatatacataaatctttttatttttttaagatataataggcttatggttgtgaaaagctaagcactggggagaaaaggatttagtcaagttacatgaaacggccagggatccagtctgacctactcctgacacactattagagccatatgacaaaagtccaccatgtcactggaggaaacccagtataaagagacagactgagtctcataatagtttgtacccttcgactgctattactgcaagcccaaggagagtggaccatccaagagatctctcggggctggagagatggctcagtggttaagagctctgactgctcttccagaggtcctgagttcaaatcccagcaaccacatggtggctcacaaccatctgtaattaaatcagataccctcttctggggcgtctgaagacagctacagtgtacttacatataataaataaataaataaatttttaaaaatagagagagagagagatctcagtgaaggagtgctcttaatgaggccgcttagcaaaggaagaattgaagcaaccatcatctttgttctgtggttgttactattatatttattcgtgttgttgaggcagggcacacattgcggcgcacatgcgaaagtcaaaggagtcagctctgtccttgtaccgtgcgggtccaggcactgagcccagttcatcaggcttggatgtgcttctgcacccactgaggtacctcaggagcttactctccgtcatcctttccctctctcagtcccatcgagtgtggttgtttgctggattacttgagaataaggagcagtcccagggatagtgttacacggccttgcctccagagcacccaggcctctcagttagttccaagccatgggtcctcagaagggcttgtgcatgctctgtgcaaggcagcattcctctggtcccttcctgctgggtgactaactctcttcattttgatgtgtgtttcagctgggaagggctacccctgcaagacgtgtaaaatagtgctgaactccatagagcagtaccaagctcacgtcagtggcttcaaacacaaaaaccagtgagtaaagtccttcggaagttcactccagcaggagtctagggtttctgagtcagatccttcccgccatagatggacggactccgagagccttctcagtcagtcaccgcggtgtctcgtgggtctcctccatcagcccttcagctagcatttgcactgactgagagctgcgggagagatgcatatgcgatttcctttatgctttcaaacagtgcctggatttcctggcctgcagcaacctgaagagggaagcatggtttccctcactggtctggggccaggctgagtcacatgtgagcctgtctaaaaacaaaaatggaaaaacctttgcataatcaaaattattataaagaaataggtggaccaggtggcacatgccataatctaacgcttggcaagtaaactcgagagagccagaagttcaaggccaaccttgactatgtggacagttagttagggaccaaaatgtggtccatgagaacctgtcccagaaaacagaatttaaaaaaaaaaagaaaaaaacctgagcagtggtggagcacatgtttaatcccagtactctagaaacaagcttccggacagccagggcttcataagagaggagaggagagaaaagaagagaaaaggttgaggcaggaggatcaggaattcaaggtcaacctggactctacttgcaaatctgagtgaaaaccgcaaactcgccaggcagtggtggcgcacgcctttagtcccagcactcaggaggcagaggcaggcggatggatttctgagttcgaggccagcctggtctacaaagtgagttccaggacagccagggctacacagagaaaccctgtctcgaaaaaccaaaggaaggaaggaagaaagaaagaaagaaaaagtcgcaaactcagatgtactgggctatgctcagcatccccgcactacgaaggcagagctgtagctccctgggctcactgggcagccagtgcagcctgcttagcaagtgcaagaccagtgaggcagaccttgtctcagaaggacataagcacctaagcaataacaccttagggccatcctcagacctacacacatgcgcgcgcgcgcacacacacaagaaatcatgtttgatgaagagtaaatgcatctcaagatcatgttaagcaagacaagccaaagtcagagaaacgcataaagtcatggctttctcccctcctttgcagatcctaaatgtcttttcttttttttttaagatttatttattatatgtaagtacgctgtagctgtcttcagacaccccagaagagggcatcagatctcattacagatggttgtgagccaccatatgattgctgggatttgaactcaagaccttcggaagagcagttggtgctcttaaccgctgagccatctctccagcccagatcctaaacttctaaataaatattttaagctagtcgattaagctttctgaagttcagcttcatatggaaaatgagagtggtctcaccatgcagaattgacttgaagttgaaatgagataccctagtatccagggatcctccataagagggaggccaccatgccattgtcccagcacatgagggaagccataccaccattagaacaagctactgagtgtaccctcatggccatgccacatgctcaccctgtgtctgtgttttcaaattacaggtcacccaaaacattggtgacactcgggagccagacgccagtgcaaacacaacccactccaaaggactcaagcacagtgcaagactaaagctgtccctgcctggtcagcctggtgggacagccataagccagttcctggtgactgcttagccgtggctccttcctcctcctctcttatatccgaagaatgtggaggcatgaggccaacttgggctgcagatctgcagatagcctgactgcgcccagatgcagctcctcctgcccctcttgagcatggccctataggccatggcaggagacagggctctgagaagacctgaggtgaaggtttagaggttggccttccccacccctctgggtgtatgtcctacagtcccgatgtctgtttttactctcaaggtcagttgggagcaaggtcctgcagagaagggagagcactgtctctgggctccaggcagctttgtgtagaaatgtggagctaatgtgtcatttcctatccctcaagtgtgcaggcttgctaggtatagatcctgccaaccatgaagtctcccagaaaacagagtctccggcagagcactgccatctccgctgcctgctgtctctccagttccctcgtggtgctaggcagctgcagcagctcggcgtcagaggagacttgagtgcccactggggtcctgataggcacctaagggggtgcaccaacccagggccatgtgagaaagtctcctacctgctatgttccttgattctgtgcccttgtaggtaactgcctcctgccagcctactaaaaggtcacttggtgttagctctatgcccttgtgtagtgggcgatcctacccagttgctgtggtgctatccctcccttgacctcctcaagaagattctgggggaactaaaaaggaatttagaactggtgcaggttctacagagagcaatagggtccccagaccctaacctgagaaattccttctgggtttgtgtcctgggatccactgcagtgggtttatacataactgtggatggagcaggtcttccaggaagtattcctaaagcttgtagagataaaacagcttccttgttagtgtcattgggtaccaagtagagatggggcagggcttaaactcttgttctttggtcactcaaccaagaaaaaaaatttcttctgtgagtcatgctgtaaccccagggctgaggttgatactgctatgacatccccacacagttggcccccagtgtccttaataacaatcttacccaggaaaggtctccctgctgccctaagcccaacccagttcatcccccagctaagggattgattcttgagatagtcactctggctactgagtgggggactgcgaagaggccagtgtgaaaactgtgtccatactgctgctggtctccagggcactcccttcagggtagatgtccaggatgttgtcttaagtgcaggatgtgtgagtgactgggtggtagtgctgaagacaggtgtcctttcccactccacttaaagagctgtcggagttttccttgaagtcctcctaggccgactggtccttgggagagccttttatttgactcataagtaacaaggcaaagagcgttatagcttagaaactcatgcagatgggccagaccaagcaccaccagccccaggtccttgtagcacactgctctgggcaccagcggcccctagctcctgacttaagctcttgactcctggcattggttctctgctttcagcttcccaactgtaggcctcctcagcagtcttcctagaagtctgtgccagaactggtgtcagaattagtaaagagcatgaagtagggaaccaaagggtaaggccctgaatgggctgactgaccattagcccttgtcttggaagacctctgtgtttaaatggattcaggagtccctaccagcttcatgtccagcactgcgagtatggaaaccctagaagtagctcgctgttgccctttggaagctcacacacttaaaaatcatgatttggagagtctcatggggcaagtgggagtgtccaggacacaagcaataacagcgtggagtagaaggctgagagaaatggctggtctctgtggctttgtttcatgtagcccaggctagtctcagacttgtcatctgggaggctagccttgagctgcttgctgaccctcccacctctgccttcctggttctgggatggtgggcacgtgcccccatgtcccacatcagctttcatccatgttattgtgggttgcttggtttgctttggtttttcaggatggggcctcattgtgtagctctgactgtcctggaactcactctgtaggccttgaactcagctccacctgcctccctcccaagtgctgccattaaaggcgtgtgccaccatgcctgactgagaggttttttaatactatctagtagtcctttatttggatcagtcacaacctagctttgtactgttgaaatcgtattgtttccctttgaggttatcttgaataaagctgctgtaaaaactgtgtcatccgatgtgtgcgctcttccactcagagaaggggatggacaatggacacttcttaccttgttttttttttttttagccagtggttctggtgttgttcagttcgtaagggccccagttcctactaagtatttccagtcttcaaagttagttgttctgacggcaacccagaagttgtacccaggggcccagtcttttaataaagagcattcttatttcagcattaaaacaaacaaaaatagtctgtctttgtattgtggctgttctgtaacctgttaaacctgcagatatccacctgcctctgcttcctgagggctgggattaaaggcacgtgctagctttcagcattttttgtaagatcatatgtggaatcaacacaagaatggtgttgggtatcagagcacgggccccacacagtgggtgaacatcagagagagctcctatcccactattctaggaaggtctcacaggggcctggctctcccagtctaggataatggcagggaactcagactagagaatcagccccggctctgctatcggtctgcctccacaaggctgatctgggttaattagctcctaccccacccccatgtgaagcagtgcctacctcagagattctgcctgtgccaagcctcaactacagataaccacacgtcctgctgtagcactctccaggtcactgtaaatgctttcagtcattccaaccattgtgaacatgggccaactttaccttgcagtgacccatgatggccactaggtggaaggcactcgtcccccccaccccctctttttttttttttaattggatattttctttatttgcatttcaaatgttatccccttccccagctcctccttcccccggaaaccctctatcccacccgccttcccctacttctgtgaggacgtttcccccacccactcctgcctccctgccttggcattcccctacactgaggcatcgagccttcacaggaccaagggcctctccccccattgatgcccgacaaggccatcctctgctctatatgcggctggagccatgggtccctccatgtgtaatttttaaaaattgggcagggtacaccagtcccaggacaaaaggaataaggtgaacttctaagtctccgtgtttgatatttcacttagccctcaaggcaactgagagaagccagtttcaccagaaaaacaggagccatgtgtcaggcgaccttggaaagagctgacccagttagttcctttttaaatattagctttatttattactgttgttatggccatttgggcacattcgtgcccctgtgcatacgtagaggtcagaggacaactggtaggaattcccctcctcccatggaatttgggggtcaagcttaggtcagtgggattctaagcttgagacatcttcagctagcttccaattctttacataagttgccatctgtagtttcaatgctgcctcacccaccaacccccttccctctctctgttttttttaaagatttatttattgactttatatatatgagtacactatagctgtcttcagacacaccagaagagggtgtctgatcccactacaggtagttgtgagccaccatgtggttgctgggaattgaactcaggacctccagaagagcagtcagtgctcttaattctcttaatcgctgagccaattaatctctccagcctcaacccccttcccttgaaggactgcaaaattagccacctgccactgagcaacctgatgtttgaccgtcttgggatcctttcttattttactttaggttataatagggtctcacagcctgagctgcctcccagatgccatcatgctctttatattttgttttattttatttttttgtttctattgagataggatatcactatgtagcccaggctggccttgaattcattatgtagcccatgttggatccaacctcacagcaatccttctgcctcagcctcctaagtactaaaattccagtactgatccaccatgtgggcgtctataccgttttgacccaccaccaccacccggggcgcatttgtgctgtggtcctggggtgtgttcccactctattctggagagtggcctgtcatccagtctaggcagtcagaacatcaatttggagctgttggtgactgaaaatctgcctgagaaagcatcacgaaggaaaacagccaagaagtgagaagaaactggtttctggtgagtgccctttgtgtgtgtgtgtgtgtgtgtgtgtgtgtgtgtgtgtgtgtgtgtgtgtgtgtgtgtgtgtgtgtgtgtgtagccttggctgtcctggaactcactctgtaaaaccagactggccacaaactcagaaatccgcctgtctctgcctcccaagtgcagggactaaaggcatgcaccaccactgccccaggactttctaattgacttttcctagaacctatttgccttcagttccgatcactttcaatatagagttctgcctggggcctgaagacacacctcggagatacagcacttaactattgtgtaggagaagctctggcttcaggctacttagctagggacctgagtaaggagcaaggtgtgtttcaatgttgtggtattaaggactgaaccaggggccttgctaggcaaaggcttagctaccactgacttaattaccctaacccaaaaaggtcatcttggactctcagcatagacaatctccagtataagcagccctgatgcaaccccagaaccccaaagctgagcctagctaatcctcagaattgcaaatcaaaattgttttaggtcttagggtttcttttgctgagataaaacagtgtgacccaaagcaacttgggaaggaaacatgctttatcttagcttacatttccaagtaactctgaacgagatcaggccaggagtggaaacagggcaggaacctggtggtgggaactgaagtagaagctatggaggaactctgtttactggcttgctcagcctgatttcttaaagaccagaagcccagagatgtcactgcccacaatggactggtggactgggcactcccacatcaattactacagcctgatattccttccttccttccttccttccttccttccttccttccttccttccttcttccctctctctctctctctctctctgtctctgtgtgtgtgtgtgtgtgtctgtctgtctctctatgtctctctctctatgtctctctatgtctctctctctctctctctctctctctctctctctctctctctctctctctctctctctgagatagcgttcttctgtatagccctggctcctggctgttctagaactcactgtgtagaccagactgacctcaaacacagagctctacctgcctctgcctcgtgaatgctgtaataaaaggagtgtgctaccatgcctaggttagggggcatttttttttttttatggtttttccagacagggtttctctgtgtagccctggctgtcctggaactcactctgtagaccaggctggcctcgaactcagaaatccgcctgcctctgcctcccaagtgctgggattaaaggcgtgtgccaccacgccccgctgggggggaggcacttttttaattgaggttccctcctctcagatgactatagtttgtgtcaagttgacataaaacgagtcagtatagtcactaagtttggaaattatgtattattaattagtgatggctcacagaaccaccaggaaaagcaagcaacctttccctctttccctttcttcctacagtaggattttccctgaagagccacaccctgctcatgtgttctgatgaccattgagaacatatttataagtgaggtctggggccgagagctgttggagcctctgtcacctttctggagttccggcctgatgcccaatagcctaactataaggaagaaaatgagtctgcagggccagagcgggtggcttgtgacagggtctcattcagccctggttggcctggaactttcttttttttttttttttgattgtttgtttctctgttctggaactccctctgtagtttgaaccttgagcttgcaaagctctacctgcctctgtcctgagtgctggatgagattgaaacctggaactctttatatagacctgcttcaaatttgtgatactcctcccggaggtggcctttgctactttgtgggttcttctttttctcaccctcccctaccccaagtttcaccccctatcactagataagaaagaaagaagaagagaggagagagagggagggagagagagagagaatgagatctttgaatctaatttttcttcttgttccttctttgagcaagagtactaacagacttcaaccaatctcttcaagtgacaagtattgggtaccaactgagaatttcccagaattccaaaggtcatgcaatcacagaaactatccatggctggcaaaaccatgcctctgctggagcatgaggcaaatcacagtcagctgctgcagacagtccaaagctcacatccatattgccagccacacctagggattcttacaatctctctctttctctctctctctctctctctctctctctctctcaatgtgtgtgtgtgtgttaaagaaacccaaattcccaaattccgcaactctcactacatcatcctgcctccacttcctgagttctgtgattacaagtgtgtatcacccaactatagaatgcatcttgaccacacagttgggttcctgggatctagctattcttgaaacctgagccacagctggacactaaaccttccaggacccatactcttattgtttcctgtgagcggatgtgagttggattatctgttatgtgcagttgaggacaatcgttccctgaaggtcagagggtttgacagggacttagcagcttcaggaatctgacaaaggggaaggaccgaggaacgtgaatgcttcttttacctcagcacctacagtacacaggacctcagagttccctggctaccattgtgataaaacactacaaagaaaaatcccagtgtagccagagtgtgtaacaggagaaaaaaattactcagtgctgggacaaaccaggtctccttgaggaattaacttcttttgtctggggatgtggatcaaacccaagactgtgcatgaaagcctctgttctgatactgaactctgctccagcccagaaagtaacattcaaactggtgctgggatgcagtttaagttggtagactgcctaccaagcccaaacacagcctgaggtccatcagcaaccgggtgtggtgatacaagtgtataaggccagcattgggaaggcggagtcaggaagattggatggccaaggttatcctcagatacatagtaaagataaggccagattggcctttataccctgtctcaaaaactaaagcaaaatgaaacaaaataaaataagatacaacaagttgggccacgcatgactgtatatacctttagtcccagcactcaggagactgagccgagaggatcaccaatttaaagccagtctgtgcttaataacaagttctaggccagcctgaagtagctagggagaccctatctcaaattaattaatttaattaggcaggaataaactggaagtgtagttcagtaacaatgagccacttagcatgtacaagtctctggctccattcccaatacaacaaacaggcttggggagctaagcttagagaacaatcaggacatgactggttggacagcacctgccaatcaaggaccccaggcaagaaagcataggtctccttgggaagcagaccagataaagagagactggtgggagtcaagtccctcaggacacgtcagccaaggccaaagcagctatacaagcttcatggccaatatttagactccaggaatccatgcaaaagcctaaaatagtgactgccataaggtctgactttcacgctgttttaagtcagggtttgtgggctggagagatagctcagcggttaagagcactgactgctcttccaaaggttcaaatcccagcaaccacatggtggctcacaaccacccataatgagatctgacgccctctccttgtgcttctgaagacagctgtagtgtacttatatataataataaataaaactttaaaaaattctttattaaaaaaaaaagtcagggtttgtattcctgcacaaaacatcatgaccaagaaggaagttgaggaggaaagggtttactcagcttacacttccacagcactgtccatcaccaaaggaggtcaggactggaactcacacagggcaggaacctggaggcaggagctgattgccacagtgtgagtatacacacacacacatacacatacacacacacacaggacacataattaaataataaataaataaatttttagaagatgaaagcagtaagtaccaggaataaaccaggaggagctttaagttcagagaactgtcagcagccttgaagaacagggctcaaactacatgacagggatcctaaatgtttcacggagttcagctttcctcctttgcaaaaaaattatcccagctggcccgttgactgttaatatcccctcatggtagggagggaggtgtcacaagaacctcacctgaagatccagctactccctgctatctattgtatgcaaccctgctcgaaccctgcatgtgttctacagtatagactaagactccttctatgcagacaaggaagccgaggatgccgtcatccctgctgtgtagactttctgctgtggcctttccagggtgaacactgtcacaggagtactcttcaaatctagaggagagctcagaagacacgtacccatagatagggtactataaacttgggcaacagtgggccatacagaagtcagtgtccacatgcctatcctttcctcccttccttccttccttccttctgtccatccatcctttccttccttccttccttccttccttccttccttccttcctccttccttcctcttatcctccctccctctgtctctcccttcctccctccctccccccttcctttctccctctttcccttcctttcttttctctgagatggtaacccaggctggagagttaacctcagttcatgaggaaccttctgccccagcctcccaggtgctgggatctcaggggtggccatggtgcctagaagcctggctctcctactttcatcttcggcggtgctgcagctccaacccagggttttgcctgtgtcagccggctacataccagcccccacaatgttttttacatccttcttttcaagatgtcaccttggagccgtgcagtggtggcgcacgcctttaatcccagcactcgggaggcagaggcaggtggatttctgagttcgaggtcagtctggtctacaaagtgagttccaggacagccagggctacacagagaaaccctgtctggaaaaaaaaaaaaaaatgtcatctcggaatggtcaactcatttctacaacatagaacagggcagaaaggaagaccaggctgtttagactgccaggcaaaggctcagaggttaacatcatttgttcttctagagagtctgagctgagtgtggcggtgcatgcctttaatcccagcactcgggaggcagaggcaggtggatttctgagtttaaggccagcctggtctacaaagtgagttccaggacagccagggctatacagagaaaccctgtcttgaaaaacaaaacaaacaaaacaaacaaaacaaaaaacaaaaaaaggagagagagagtctgagtgtgttttcagctcccacagggcaattcacagcaatctataactccagatccggcccctttggacttccaagcatttacatgatgcatatacaaatgttcaggcaaaatgctcacatagataaaaataaaataacttcatctaagatatgttttaaatggccacagtgtgattcttgacgtgtgtctaacagctattgcaccagtcaccttctcgctcagacttctgatgcagggacaccagccagaatgtactgaggaccctaaagtggcccaagaggaaggcgctcaaggagagttattggcactcctgccaataactaagattcttagtgtatgcaggctccagtccttctactaccccatctgtgcctctccttgtaaaatccagtcttagaaaagagctctaagaagtcagtttgtcaagaataccctattcccagtgtagactaactgagctacttaccctcccccgactccctatgcactcactgtccaccctgaccccaggagtctgatcaatatggcaagatgtgtctgtagcaagattcctgctaggtcagttgaacagaatgcccttatccctcatttgtcctcttagtcattttctgtcccagaggcccttggctctaagatctcacttatccgtgttgcatttagagttgccccatctttgttccccaatataagactctgttgctatcacagtggtcttaaatgaggtcttcctcattaatctgtaccaaatatgtctgccatgatttttgttgttgttgttgattcggttggttgctgttttgtttagacacaatctcatgtagcctaggctggccccagctttacacctggaagaaacagaaggatcagaagtgcaaggtcatctttcggtactgtgctcaaggccagcctagatggactactagataccctgtctcaatttaaaaaataaaaaatgcaagccagtgctggacaaacctgactccttttattccttcctcaccacacacaggtcccatgtggagagcacagcccttccttcctaccacctccgtctgctgctctctcctgtctagtctgtcacctttaagtgaccctttgtttacctactgcataaagctccagataggccatccagaatccacctgagaagttcccatcctggcacctctgcacctgctgctcttatgcctagcaatggcctcccttggccatgcctgcctctctttccctctgcccagatgtcccaccagattcctgccattcagtgtcctgaactttcctctcaacttgtcctgaacttgttccctctcagacccgctgaccattcctgactacacatgtctctttctggtaacaacaacctctctgttctttgctggtgccctggtcctcctgtctatgtgaattctccctgtctgttgtggagtccatgtgtcccaagccagccatgtgtggtggctcctaactgtaatcccaaaacgcaggagactatgaggatcaagaggaggctagcctggcctacactgtgagttccaggcaagtctggactatatggtgagaatctcttttgtaaagagaaggtagccagagagatggatctgtggttaagaaaacttgctgggttcagttcctagcacccacatgatgatcaagcatctataactccagttccaaaggatcctatgtcctcttctggcctccctggtaccaggcacacacatggtacacatatgtgcatgaaagaaagagggacccatacatgtaaataaatctcttgggctggagagatggctcagcagttaagagcactgactgctcttccagaggtcccgagttcaaacctcagcaaccacatggtggctcataaccatctgtaatgagatctgatgacttcttctggggtatctgaagacagctacaatgtacttagatatattaataaataaatctgggctggagagatggctcagaggttaagagcaccgactgctcttccagaggtcctgagttcaattcccagcaaccacatggtggctcacaaccatctgtaatgggatctgataccctcttctggtgtgtctgaagagagtgagagtgtactcacatatataaaataaataaatcttaaaaaagaaaaaataaggagaaaccctgtctcggaaaaccaaaataaataaataaataaataaatctttaaaaaaataaata

SEQ ID NO: 3223 - DNA, 3340 bp, Mus musculus
cgcagcttcttaacggcgcgtcttgccggaaagatggagtgtcctgcgcccgatgctacggatgctgcggaccctggagaagccggaccgtacaagggctccgaggagccggagggtcgggaaccggacggagtgcgctttgaccgcgagagggcgcgtcgcctgtgggaagctgtgtccggtgcgcagccggcggggagggaggaagtggaacacatgatccagaagaaccagtgtctcttcaccagcacccagtgtaaggtctgctgtgccatgctgatttctgagtctcagaagctggcgcattaccagagcaaaaaacatgccaacaaagtgaagagatacctagcaatccatggaatggagacaataaagggggacgtgaagaggctagactcagatcagaagagcagcagaagcaaagacaagaaccactgctgccccatctgtaacatgaccttttcctcccctgctgtggcacagtcgcactacctggggaagacccacgcaaagagcctaaagctgaagcagcagtccactaagggggcagccttgcagcagaatagagagatgctagacccagacaaattctgcagcctctgccattcaacattcaacgaccctgccatggctcagcaacattatatgggcaagagacacaggaagcaggagactaagctcaaactcatggcacactatgggcggctggcggaccctgctgtctctgacttaccagctgggaagggctacccctgcaagacgtgtaaaatagtgctgaactccatagagcagtaccaagctcacgtcagtggcttcaaacacaaaaaccagtcacccaaaacattggtgacactcgggagccagacgccagtgcaaacacaacccactccaaaggactcaagcacagtgcaagactaaagctgtccctgcctggtcagcctggtgggacagccataagccagttcctggtgactgcttagccgtggctccttcctcctcctctcttatatccgaagaatgtggaggcatgaggccaacttgggctgcagatctgcagatagcctgactgcgcccagatgcagctcctcctgcccctcttgagcatggccctataggccatggcaggagacagggctctgagaagacctgaggtgaaggtttagaggttggccttccccacccctctgggtgtatgtcctacagtcccgatgtctgtttttactctcaaggtcagttgggagcaaggtcctgcagagaagggagagcactgtctctgggctccaggcagctttgtgtagaaatgtggagctaatgtgtcatttcctatccctcaagtgtgcaggcttgctaggtatagatcctgccaaccatgaagtctcccagaaaacagagtctccggcagagcactgccatctccgctgcctgctgtctctccagttccctcgtggtgctaggcagctgcagcagctcggcgtcagaggagacttgagtgcccactggggtcctgataggcacctaagggggtgcaccaacccagggccatgtgagaaagtctcctacctgctatgttccttgattctgtgcccttgtaggtaactgcctcctgccagcctactaaaaggtcacttggtgttagctctatgcccttgtgtagtgggcgatcctacccagttgctgtggtgctatccctcccttgacctcctcaagaagattctgggggaactaaaaaggaatttagaactggtgcaggttctacagagagcaatagggtccccagaccctaacctgagaaattccttctgggtttgtgtcctgggatccactgcagtgggtttatacataactgtggatggagcaggtcttccaggaagtattcctaaagcttgtagagataaaacagcttccttgttagtgtcattgggtaccaagtagagatggggcagggcttaaactcttgttctttggtcactcaaccaagaaaaaaaatttcttctgtgagtcatgctgtaaccccagggctgaggttgatactgctatgacatccccacacagttggcccccagtgtccttaataacaatcttacccaggaaaggtctccctgctgccctaagcccaacccagttcatcccccagctaagggattgattcttgagatagtcactctggctactgagtgggggactgcgaagaggccagtgtgaaaactgtgtccatactgctgctggtctccagggcactcccttcagggtagatgtccaggatgttgtcttaagtgcaggatgtgtgagtgactgggtggtagtgctgaagacaggtgtcctttcccactccacttaaagagctgtcggagttttccttgaagtcctcctaggccgactggtccttgggagagccttttatttgactcataagtaacaaggcaaagagcgttatagcttagaaactcatgcagatgggccagaccaagcaccaccagccccaggtccttgtagcacactgctctgggcaccagcggcccctagctcctgacttaagctcttgactcctggcattggttctctgctttcagcttcccaactgtaggcctcctcagcagtcttcctagaagtctgtgccagaactggtgtcagaattagtaaagagcatgaagtagggaaccaaagggtaaggccctgaatgggctgactgaccattagcccttgtcttggaagacctctgtgtttaaatggattcaggagtccctaccagcttcatgtccagcactgcgagtatggaaaccctagaagtagctcgctgttgccctttggaagctcacacacttaaaaatcatgatttggagagtctcatggggcaagtgggagtgtccaggacacaagcaataacagcgtggagtagaaggctgagagaaatggctggtctctgtggctttgtttcatgtagcccaggctagtctcagacttgtcatctgggaggctagccttgagctgcttgctgaccctcccacctctgccttcctggttctgggatggtgggcacgtgcccccatgtcccacatcagctttcatccatgttattgtgggttgcttggtttgctttggtttttcaggatggggcctcattgtgtagctctgactgtcctggaactcactctgtaggccttgaactcagctccacctgcctccctcccaagtgctgccattaaaggcgtgtgccaccatgcctgactgagaggttttttaatactatctagtagtcctttatttggatcagtcacaacctagctttgtactgttgaaatcgtattgtttccctttgaggttatcttgaataaagctgctg

SEQ ID NO: 3224 - protein, 292 aa, Mus musculus
MECPAPDATDAADPGEAGPYKGSEEPEGREPDGVRFDRERARRLWEAVSGAQPAGREEVEHMIQKNQCLFTSTQCKVCCAMLISESQKLAHYQSKKHANKVKRYLAIHGMIKGDVKRLDSDQKSSRSKDKNHCCPICNMTFSSPAVAQSHYLGKTHAKSLKLKQQSTKGAALQQNREMLDPDKFCSLCHSTFNDPAMAQQHYMGKRHRKQETKLKLMAHYGRLADPAVSDLPAGKGYPCKTCKIVLNSIEQYQAHVSGFKHKNQSPKTLVTLGSQTPVQTQPTPKDSSTVQD

SEQ ID NO: 3225 - DNA, 64246 bp, Homo sapiens
aaaccacacaaaaagaaaccacactgaatcaatgaaaaaaataaattattccataatgatattcaaaaaagtaaaaactcatttgtgcccattcaaagtagatgtttaaacaagctcttaccttaaaaatcagtaaggcaggaggattacttatggccaggagttccagaccagcctgggcaacattgtgagacccccatctctacaaaaaatgaataataaaactagccaggcttggtagtatgtgcctatagtcctagctactttggaggctcaggcaggaggattgcttgagccatggagtttaaggctgcaatgagctatgatcttactattgcactctagcctgggtgacagacggagatcttgtatcaaaaaaaaaaaaagggccaggcacagtggttcatgcctataatcttagcactttgggaggctgggtggatcagctgaggtcaggagttcgagaccagcctggcccacatggctctactaaaaatacataaattagccgggcttggtggtgcacatctgtaatcccagctacttggaaggctgaggcaggagaatcgcttgaactcaggaggcggaggttgcagtgagctgagatcatgccacagcactctagcctggacaacagagcaagactgcatccaaacacacacacacacacacacacacacacacacacacacacaaagatactttctgatcataagagaggaaacttatttacataatggaaggtttaaactaccattaccctaatccggtggtcaatttagcttcacttggcgaattaatcagatatgatgttattatgttcttcagatgctacacaacatgaatcatgcaacatctccaaagacgtattctagccaaaatatttgacttaaatacaccaagtgtttagatataacttccagttaaaggaaacacagccaatagagatacaagctaaaaaccacaaggaaaaaagcaaccaatgcttctcaaactacagcacttacactatgatttattacagccaaaggatacaaagcaaaatcagcacctgggatgaagtccaaaggaaactgggcacaagtttcaagagtaccttcccagtggagtcacttaattcctccagcatctaattgtgacaacatttgtgaagtggtatctaccagggaaacttgcctgagcctaggaatccagggttttatcaggggtcagttacacaggctgcctagcttaccactctgcctagtgcaaaccaaagtttcacactcccagaaggaaagtagatgttcagcataaactatattgtttgcacaaacagtttagactcagtgagccactttttttcttttcttttttttttttttttttttgagacagagtttcgctcttgttgcccaagttagagtgcaatctcagctcactgcaacctccacctccccggttcaagcgattctcctgcctcagcctcccaagtagctgggattacaggcatgcaacaccatgcccggctgattttttgtatttttagtagagacagggtttcactatgttggcctggctggtctcgaactcctgatctcaggcaatccacctacctcggcctcccaaagtgctaggattataggcatgagccactgtgcccagctgcagtgagccacttttatatggaatttggaaacacttctgaaatccaagttcccagatgccagccaaaagccaaacttgagagcagacctttcaaaggtctactatagcctcaaacctactatgttaattcttttctgcacaatatgtaatgctgtggttgaaacttggggtggaagttgaatgagtttgtcaaatggacaacaggagatggtagaaggacattaaaggtaatattggaaggctgaggcaggagaatcgcttgaacctgggagggcagaggttgcagtgaggtgaaatcacagtacttcactccagcctgggtgaaagagcgttaactccatctcaataaataaataaataaataaaggcaatgggaatagaatgaataaaggcaaaggggtgtgaaaggattccccagttggagaacctaccacagtgctaaagttcatccagcagggcttggtacttgagagagtattggaagtgggtggaaaaggaagtagaatatactgggtctcttataccacgtgacattttaactttatccggtaagcaacaagaagccattgaagtactgcaggtaagaaaggagtatagaccaggcacggtggctcatgcctgtaatcccagcactttgggaggccaaggagaacagatcacctgaggtcaggagtttgagaccggcctgacaaacatggtgaaacctcatctctactaaaaatacatcagtatgttaaattatcagaaaaatatagcttttggaataaactacatagctaccatttactatgtgccaagcaatgtgctaagtagtttacggagattatattagttaatcttcacaacaaccatttgaggtgggtatcatctcctcattttacagatggagaagcagcctcacaaatgttaaggaatttacctaagatcacataactcatgcatgcagaatggagcaatacatgtcaagctaagtaccacacagcgttaactgctcaattctcagagatttgtggttaatccccagcctgcttgcctcagacattgtcagggttcaagatatgacggctatctgttgcagctggactctcttcctgatatggctctggacatacatccctccagctccaagggtggcccagcggggcatgtagagtggctggaattcccaaactgtcactgcagtgatgaggaggagcaaccttatctgtttactctaacatgctatacagatatgctcattttctatgtggactataatggagaaaaggctggaaagcattacttgactctaacccaaaatcctctgtaaatcccagtctgtgatcaacagactcccctctgccctcaatctgtccttagaaagtctctaaattaaaacctggcatcccctgaagacactgcttccctgcgtccctaaagataccataaaattaggccaggcatggtggctcacacttgtaatcccagcactttgggaggctgagacaggcagatcacttgaggtcaagagttcgagaccagtttggccaacatggtgaaaccctgtctctacctaaaattaaaaaattagccagacgtggtggcgcacatctgtaatcccagctactcaggcagctgagacagaatcacttgaacccgggaggctgagggtgcagtgagccgagaccacgctaccacattccagtctgggcaacagaagaagactccatctcaaaaaagaaaaaaagaggcaggacgcggtggctcatgcccataatcccaccactttgggaggccaaggtggggggatcacctgaggacaggagtttaagaccagcctgaccaacatggtgaaaccccgtctctactaaaaatacaaaattagccaggcatggtggctggtgcctgtaatcccagctactcaggaggttgaggcaggagaatcgcttgaacctgggaggcagaggttgcagtgagccgagatcatgtaattgccctccaacctggatgacagagcaagactccatctcaaaaacaaaacaaaaccaaacaaacaaaatactataaaattatccaggctgggcacggtggctcatgcctgtaattccagaactttgggaggccgaggcgggcggatcacgaggtcaaaagatcgagaccatcctggccaacatggtgaaacgcccctctactaaaaatacaaaaaaattagctgggtgtggtggcacgcacctctagtcccagctactcagaaggctgaggcaggagaatcgcttgaacctgggaggcagaggttgcagtcagccgaggttgcagtgagccgagatcttaccactgcactcatgccactgcactccagcctggcaacagagtgagactccgtctcaaaaaagaaaattatccagtaggccgggcgcggcggctcatgcctgtaatcccagaactttgggaggccgaggcaggtgaatcacctgaggtcaggagttcaagaccaccctggccaacatggtaaaaccccgtctctactaaaattacaaaaaatagccaggcatggtggcgggtgcctctagtcccagctactcaggaggctgaggcaggagaatcacttgaacccaggaggcagaggttgcagtgagctgagattgcgccattgcactccagcctgggtgacaagtgtgaacctctgtcaaaataatgaaatgaaatatgaaatgaaatgaaaaatgaaatgaaataaagaagcctgagaagtggactaggattgcagcaaagatgtgcccctgggcccctgctgggcttggtagttccacagttctcctcaagagcaccccttctgttctggaccaatctcagattctgattcaaacaacacttctttacatcctgttagtaaaagctaatctgtggccacctctaatagtttgagatgtgttcttagagatgagaaataaaaagactattaggaggtaactcagataccattctgatccccacatggtagattcattgtcccaccccatccacactagcccactagccttggctgtcatctccctcttttttatttttttgagatggagtcttgctcttcttgcccaggctggagtacagtggcgcaatctcggttcactgcaacctccgtctcctgggttcaagcaattctcctgcctctgcctcctgagtagctgggattacaggcttctgccaccatgcctagctaatttttgtattttttagtagagacgaggtttcaccatttgaactcctgtccgcaggtgatccgcccacttggcctcccaaagtgctatgattacaggcctgagccaccacgctggcccttttttttttttttttgagacagggtcttgctgtgtcacccaggtggtagtgcagtggtacaacagctcactgcaggctcaagtgatcctctcacctcagcctcctgagtagctgggaccaaaggcacacaccaccacacccagctaatttttttaattttgtagagatagggtcttgccatgttgcccatgatggtcttgaactcctggggtcaagcaatcctcccgcctcagccttccaaagtgctgggattacaggtatgagccactgtgcccagcctagtcattatctctgttatagcagttaaaacatactctctgatattacatactcagtagatacttttatgtctgtcactagattagacatactagagttagaaaaactagagtttaaggctgggcgtggtggctcacactggtaatcccagcactttgggaggccaaggtggtcagaccacatgagatcaggagttcaagatcagcctggccaacacggtaaaatcctgtctctaataaaaatacaaaaattagcttggtgtggtggtgcacacctgtagtcctagctacttaggaggctgaggcggagaattgtttgaacctgggaggcggaggttgcagtgagccgagatcgcaccactgcactccagcctgggtgacagagtgagactctgtctcaaaaaaaaaagaaaagaaagaaaaactagagttgaatctctttgagagcaagaactatatcttaagcactatagtttcgtttgcacatgcacacacatgcacatacagagtcagtatttaagcaactgaaatgtatgctgaactgtagccagttcccgtcccttagcaaagtcatttccctgggattgttcatctcccatggcaacaatacacagtaggatgtgttggaaaatggttctcattttccacaaggaggaaataaaaagccagcccaacaaatataaggcatcacctgcactgccaggtcccagcaaggagtccaggcctgggccattcctggaagcactcacacaaagacaaaatagaaaactggtgacaatgaaggctgttcagaccctcagcagggtagctcaggactctgcctccatggcacaggggatgaaccctgacagcactcattggagaataaatggacattattttgagcatgtaattggattggaggttgttttccaataatatgcaaagcaacttatatactccactcccagtatttgttacatagtattaaaaatatccttgtgggttctgcgacttcgacaaaaatcccctgtatcccttggattatccctgaataacttatgctatatgcaagtgtaagtaactagaactcttaagataaataagtagtttgtgaccatcctggctaacatagtgagaccccgtctctaaaagtaaataaataaataaaaagagaataaataatgtgcagtcactgacttttaggctggtcatctggttttggcaaaaggacatagatttgcaatctaaggaccagtgttcaagcatgggctcgtacctaactagctgtgtgatcttcacaaaacctttacctttcctagtctgtttctttatcatcacttatgaagaaatccctcacagaaaccaccctgaggattaaatgctataatgtaggtgctttgcaaactgtaaagcactgccctgggctgggtgtgtggttcacaccaggaatcccagcactttgggaggctgaggcaggaggatcgcttgagctcaggagtttgagaccagcctgggcaatatagggaaaccctgtctctacaaaaaaaaaattttttttaattagctgggcatgttggtgtccacttgtagtccttgctactcaggaggctgaggctggaggatcacttgagtgtgggagttcaaggttacagtgagctatgatcataccactgcactagtgagaccctgtctcggaaaaaaaaaaaaaaaaattgtaggctgggtgtggtagctcatgcctgtaatcccagcactttaggaggccaaggcgggcagatcacctgaggccaggagttcaagaccagcctggccaacaagatgaaaccccgtctctactaaaaatagaaaacatagctgggtatagtgatggatgtctgtaatcccagctactcgggaggctgaggcaggagaattgcttgaacccaggaggtggaggttgcagtgaactgagatggtgccactgcactccagcctgggcaacagagactccgtctataaaaaaaaaaaaaattgtaaaacactggccaaacatcagtcacctactgtattggaagcttggaagctctagggcctgaggcctgacatagtgctggtgctcaatatttgtagtataaataaggaaatacttgtagtataaatgactaaattacaccaatgagctatatgatctcaagcaagaataattcatatctgtctctctttggcctcctctgatattactttcctccttgttcactgggctccagccatgctgtcgtttttcctgttcctccaacacatcatgctctctcctgcctcagggcctttgtacctgctgttctctctgctagaacactcttgcccagctctttgcatggctacgccttctcattaatcaggtcttagctcaaatgtcattttcccagaggcttctcctgatgccaccctgattaatgttcctaacacatcattcacctgagatgcaatcctgttttatcttctccttagcacttattattgttaactttttttgtttttgagatggagtctcgctctgttgcccaggatggagtgcagtggcacgatctcggctcactgcaagctccgcctgctgggttcacaccattctcctgcctcagcctcccgagtagctgggactacaggcgcccgccaccacgcccggctaatttttttgtatttttagtagaaacggagtttcaccatgttagccaggatggtcttgatcttctgacctcgtgatccacctgcctcggcctcccaaagtgctggattacaggcatgagccactgcgccaggcctactgttaactttcttattgtactctcctccactacaataaaaaatactttactacagcttccctgtcttgttcaccactatatttccatgctcaaaatatcatctagctcatagtaaattctccataagtatttgaaaaaatgaggttgaaataagctagtaatattaaaagcttcattcattaaacaaatgttttgtatatacctaggagggtccaggttctatttcaaagtgctggagattcaggtgcaatgacaagagacaaaaggctacgcaaggtggcatgtgcctgtaatctcagcattttgggagcccgaggcaggcagattatgagatcaggagtttgagatcagcctagctaacatagtgaaaccccgtctctaccaaaaatataaaaattagctgggtgccgtggcatgtgcctgtaatcccagctactcaggaggctgaggctggagaattgcttgaacccgggagacggaagctgcagtgagccgagatcgcgtcactgcactccaacctggcgacagagcaaaactctgcctcaaaaacaatttaaaaaaagaaagaaaagaaaagagacaaaaatccctgccttcctggggcttgccttctagtcgggagacagacaataagcaagataaaaggtaaaatataaaagaaataaagcaggaaagaaggacatgaagtgtgtgtggaaaagtaacattttagatgggatagccagacaaggtattttagatagagtagccagagaaggaagtgggagactgagccatgaagatatatgagagaaattcaccccaggaggcctggataactgggacaggaattaaggagttggggactgagtaacacatcaggatcagggaggttaagggaagtcagattgtacagggccttgttggtcgaagtaaggactttggctttttttttttttagtcggagtttcgctcttgttgcccaggctggggtgcaatggcgccagctcggctcacagcaacctctgcctcccgggttcaagccattctcctggctcagcctccgagtagatgggattacaggcatgtgccaccacacccgtctaattttgtatttttagtagagacggggtttctccatgttggtcaggctggtctcgaactccggacctcaggtgatccgcccccccttagcctcccaaagtgctgggattacaggcgtgagccaccgcgcctggccggactttggcttttactaagagtgagatgggaagctgttggaggatttgagaacctaagcgtcatgatctgacttgtcataagaggattcctggaactgctgtgctgggaatgccagtgaggttgctactacaataacctaggcaagagatggtggctcccaaagacacgggaaggagcagctctggggttggaagataaaatttggggtctgacagctacattggagaagcctattagccattcgagtgaactgtggaagaggcaactggatgtatacaggtccggagtctcggggaagatcagagctgggagctggcacttggaactcaacaaatagtatgtattattagcagtaatatggaaccttagctgtactactacttactagtagcgagctcttgagttaaccatttttaggttctgggcctcagtttccctgtgaatgaaatggcgaaaacactcccacataacgggaccttgagaacgaaatgaaaagtatcaagggctgaccgtgagcaaggtgagagccatgagccaaaaccacacgagcctctccgggaggggggggtcactgctgcggaatcagcgacaggtttccgaatccacggcacacgctctgaggtaccagaggtagcaaagcaaaataagcgcggggtcccgcacggcagcgcgggtgcagcgcccaaacctcgcgagatttgttggctgggccaagtaccacccaccaaatctcgcgatacctaggcgcctgagaggctctctaccggtgagggtttgcggggaagatggagtatcccgcgccggccacggtgcaggccgcggacggcggagcggccgggccttacagcagctcggagttgctggagggccaggagccggacggggtgcgctttgaccgcgagagggcgcgccgcctgtgggaagccgtgtccggtgcccagccggtgggtagagaggaaggtgagtcgggggctttggaggcagaaagcccctcgcccgctgcgcggctcgcggggaactgcggaagcgccgacggtcacaccccctggcccgcctccttgcgtgctgcgccccgggacccccagacttgtgctccccatccgggcgcgggcaccccaagaatcgggcccccagcgcgctgagggtgaagggccgctcacgctcaggccctgggttttcctcctcctccttcatcattcactacagcgcagtttttcccacattcgaggactgtcatccctatactcgtcctgtcggagacctacagtctttgccatcccggtaagccaagccgagtgcccctcaccactccttgactccccatcgtcccaatctccagatttcctcctagggcctctcgcctcccttctctcaagccccacacttccgagggctctggaaggccttctccttaccccctgggttcctcctggtcttgatgactgagccctggcttacccgtttttagctctctggcctctacttgctgggtcccttattctaaggtggggacaaggagcctgagaaactggtctgggtttgctttggctccagcttctttgtgtcctacacttgacccaaagttgctgagaacagtgtatgcaaagccacgttaggggtcactcctgggccgaagcgccccagcttgctctgcacttgacctgagactgggtaagatgggatgaaagaaagagaaggatggaaaagagctgtcctgacctgcttgtgtgactcccttcactgtcctttacagagccagctgcttgatgctaacccagatgtacaagaactctatctgggcttctctgctaaccttgtcaggtatctggagggaaatcagatttctccagtgatttgtttgcttgctgagcagacttgtcttggaaagtttaatatgctatttgtgaactgactgccctggataaaattggataaaattgaaattttgaccatatctaaggaaggtacacagacctataccctggtatatacttctccaatttaaaaacaagtctagcctgtctcctaagtttatatatatatataatgtatattatatataaaaaagaaggagacagggccccagaaatggtgtgtgtgtatgcgtatatataatatacacacacataaatgtatatatataatatatacacacataaatctgtatatatatttttatatacacttgtaagtattttatgtatacacacacacacacacacacacactatttctggggccctctctcctttttttttttttttttttttttgagagagtctcactctgtcacccaggttggagtgcagtggcacaatcacactgcaacctccgcctcctgggttcaagcaattctatactgcctcagcctccggagtagctgggattacaggctgctgccatgacgctcagctgatttttgtatttttagtagagatggggtttcaccatgttggccaggctgttctcgaactcctgacctcaagtgatctgcccgccttgacctcccaaagtgctgggattacaggcatgagccaccgcacccggctctcctactttcacacttgtttggtagtttcctcccctaccccaattttcctttcattaacttgacaaacactcactgatgcctgctctggacccggaactggttgagcttcagagctggagtatcagaggaagatactgcccttgccctggaaaggcttgcagtctagtccaggaagcagacaccaaaacagttccagtgtaatgtaaaggatgcagtgctgaggaatgttttaagagttggaggtgcacaagaagaaagtgacctttgccctggatcttgaagcagaaaaccactgtgctctgaaaagtgaactgtctgctatgtgtatatgagtgtatagtggcactgttatgacccatttcatttccctgttctcacttctcccacatttatgtgaaatctaggtagacacctacaacattaagttctactcaccctttttctactcttagcaccttcatgtgagttacaatttatataccatacaagtcacccattgtaagcatatcgccagtgattgttagccagtgtacagagttgtatagccattaccacagtccacttttagaacatttccgtcaccccaattagttcctttgagctcatttatattaaatccccactcccacctcctgccctaggcaaccagtgacctgttttctgtcttgggtagtcttttgagtttggcttctctcagcatgtttttgaagttcagccaagtcatggtgtgtattagtacttcattcctttttattgctaaatagaattccattgaatgaatataacacattctattaatccattcattagttctagacatttggattgtttccagtttggagtttttgtgaatagtgctgctgcgaacattcatgcccaagtttttgtgtgaacatacatttcatttcttgagtatatccctaagagtggaattgctgggtcatatcgtaactctgacattttggagaactgccaaactgttttccaaaatggcttcaccttttatatttctgccatcagtgtatgagggtttcgctttttctataaccttgacaacacttgtcttttttgattataggcattctagtgggcatgtagtgatatctcattgtggtttcctaaagactgataatactgagcaacttttcaggggctgactacccatttgtagatctttggtgaaatatctattcacatcatttgcctattttgtaattgggctgtttgtcttctactgagttgtaagagttatctgtgtattctgggtacaagtcttttattatagatatgatttccaggtatttccccctgactgtgacttgttttttcattttctaaacagtgccttttgaagcacaaaagttttaagttttgatgagattaaatttatcattttttatcctatgtattgtgctttagtgtcatatctaagaactctttatcttaacccaagatttgagaaattttctcttgtagatcttccttattattattattatttttttttttgagatgcagtctcaccctgtcacccaggctggagtgcagtggcatgatctcagctcactgcaaccttcgtctccctggttctcctggaggaggtcaagcgattctcctgcctcagcgtcccgagtagctgggattacaggtgttcaccaccacatctggctaatttttgtatttttagtagagatggggtttcaccacgttggccaggctggtctcaaactcctgacctcaagtgatctgcccccttcagcctcccaaagtgctggcattacacgcgtgagctaccatgcccagccccttcctcatcttgtttctgaaggagtttgtgaaggatggattggtaatttttttttttttttttttttttttgagacagaatcccactctatcgcccaggctagagtgtggtggcacgatctcagctcactgcagcctccctgtcccagatttaagtgattctcccgcctcagcctcctgagtagctgggattacaggagggtgctaccacacccagctaatttttttgtatttttagtagagacagagtttcaccatgttggccagactggtcttgaactcctgacctcaggtgatccaccagccttggcctcccgaagtgttgggattacaggtgtgagccaccacactcagttggtaatatttctttttacagtattttatagaagtgttgacctgcaaggaagaggctaacacacaaaatatgatttgaagagtttacttgatttttaaaggcaaaaaaatgtggacagggagtgggactcatacaaagttgtttatcaagaattctcattgatttacagaaataacattggttagtgattggctgtacattaagctgtaggatgtaggatatagcgtcaggtagggcattattaggttaatccttacccacttgtggcaatagcaagcagttttgatagatgaatcttagctcaaaaagggagaataggaagtgattgctatctcattttaatatctctctgggccctgatcatttaaaaaaacttggattctttagataaaagttatcttcttttttttcagacagagactcactcttccgcccagactggagtgcagtggtgtgatctcggctcactgcaacctttgcctcccgggttcaagcgattctcgtgcctcagcctctcaggtagctgggattacaggcgcctgccagcacacccagctaatttttgtatttttcgtagagacggagtttcaccatgttggtcaggctggtctcaaactcctgacctcaggtgatccgcctcagcctcccaaagtgctgggattacaggggtgagccatcacgcccagccgataaaagttattttctgacctgcctgggcaacgtggagaaaccctgtaaatttttgtaaaatttgtgtttttgtaaaaatacaaacattagccaggtgtggtggctcacatctgtaatcccagctactcaggtggctgaggcacgagaatcgcttgaacccaggaggctaaggttgcagtgagccgagattgtgccactgcactccagtctaggcaacacagttgagactttgtctcaaaaaaaaaaaaaaaaaaaagttatcaccagtgaagctacctgggcctaagcttttctttcttcctttcctttttttttttttaaattctctatttatttatttagagacagggtctctgttgcccaggctagagtgcagtggcacaatcatagctcactgcagcctcagactccttcaaactcaaagctaggactgcaagggcataccaccatgcccagctaatttttgtgtttttttaaatagagggtcttgctctgttgcccaggctggtctgaaactcctggcctctagtgatcctcctgcctcagcctcccaaagggttaggattataggcaagcatgcgccatggcacccagctggcttcggcttttctttgtggaaaggtatttgattattcattttctttacttgttttaagtgtacacagaatattttgtttctccttgtgtcactttttttttttttttttttttttttttttgagacggggtcttgccaggctggagtgcagtaatgatcactgcagccttcgcctcccaggttcaagcaattctcctgccccagcctcccgagtagctgggattacaggcatgtgtcaccatgcccggctaacttttttgtatttttagtagagacggggtttcactgtgttggccaggctggtcttgaactcctcgaactctaaagtgatctgtccgcctctgctttcccaaagcactgggattacagatgtgaggtccctgattattttcttggttagtctagctaagaatttgtcattttcttgatcttttctagtttctaaggtaagatcttatgttgctgatttgagtgatttgagatccttcttttctgatgtagatgtttaaaattataaatttctctcttaagcacttgtgacgttttatatatatatatatatatatatatttccctccatagttcctggctcacagcttctataacccttgtactttcctcagtgactaaagcagtaagagtatcttctgttaaaatatttggccttttgtccttgcttcctgaaacacctctggaactgctccagagcaagaaaggtgaaaaacagacttttgttatttataacaagcccctttcttttttttttttttttttttttttttttatgagatggagtctcgctctgttgcccaggctggagtgcagtggtgcgatctcggctcactgcaagctccgcctcccaggttcatgccattctcctgccccagcctcccaagtagctgggactataggcgcccaccaccacacctggctaattttttgtatttttagtagagacggggtttcaccatgttagccaggctgatctcgatttcctgacctcgtaatctgccctcctcggcctcccaaagtgctgggattacaggcgtgagccaccgcacccggccatataacaagcccctttcagccacaccttggtacatgttaatagggtgatttttgagaagtccctagattaccacattctggttggctggttgccataggaaccaaccatgtgctcagaggcttggaagttacagccccccatcttgagagggtagaaaggagctgaaggttgaattgatcaccgatagccagtgatttaatcaaccatgcctatgtaatgaagccttcataacaacccaaagacctcagtttaggggcttccaggaaggtgaacaagaacacattcatgtgctggaagtgtggcacaccccaattccatggggatagacgctcctacacattagacccttccagacctggccgtatgtatctctttatctatttgtatcctttaacatatcttttaggttggcctgacccagtggctcctgcctgtaattccaaaactttgagaggccaaggcaagaatgttagtggccatgaatctcaatttctgcctcctcagaagaaagaattcaaccaaaggggcataaggcaaagtgagagaccaaggcaactcttagagcaagagtgaaagtttattaaaaagttttagggcaggaatgaaaagaagtaaagtatacttggaagaggaccaagatggcgacttgagagagacaagtaggcggtttgacctttgacttgggatcttacacattcacacgcttgctgggtcttgcgtgttacttctcccctggtttttccctgagttctgtgagctgctctagcaaattaattgaatccaggggtgtcatggaaacctcgatttatagccggttggtcagaaaaacaggtgaaagaatgtggaacctgcaattggcatcagaagtagggctcagtcttgtaggaataagccctcaacctgtaggatctgaagctgtctccaggtagatagtgtcagaattgatttgaattaggggacaccaactggtgtccactgcagaattgagtgcttggtttctgggaggagaaaacccacacatatggtcacagaagcgttctgtattgtaaaagtaaagtaggataaactgagttttttttctccagagcactgctttagttgcaactcataaatttttgaatgttttattttcacttaaatcagttcaaaataatttctaatttcccttgtaaaatttcttctttgatacatgttattcaatttctaaatatttgaggatttcccagatttcttcctattgttgatttctgattaaattccattgcgttcaaagaatatacttgagatgagttcagtccttttaaatgtagtgcaactgggctgggggcggtggctcacgcctgtaatcccagcactgggaggccgaggcgggtggatcatttgagggcaggagttcaagaccagcatggccaatatggtgaaacccccatctctactaaaatacaaaaattagccgggcatggtggtgccgtgccatggggtttcaccgtgttagccaggatggtctcgatttcctgacctcgtgatccgcccgcctcagcctcccaaagtgctgggattataggcgtgagccaccatgcctggctatttcatttttaaataacagctttattgacgtaaatctcacattccataaaattcacctgtttaaaatgtacaattctgtggtttttagtatattcacagagttctgcaaccatcaccactgtctaattttagaacattttcatcaccccaataaagaaaccctatacctaggagcaatcatccctggcaacgacttatctcctctctttatggattgatgcctattctggacatttcatgtaaatagaattgtataaatatgtggcatttttgtgactggcttctttcgcttagtgtaattttttttttttttttttttggtttttttttgagacgacattttgctcttgttgcccaggctggagtgcaatggcatgatctaggctcactgcaccctctgcctgtagagttcaagcgattctcttttttctgttttattttgttttgagacagagtctcgctctgtcgcccaggctggagtgcagtggcgcgatctcggctcactgcatgctccgcctcctgggttcacgccattctcctgcctcagcctcccgagtagctgggattacaggcatgcgccccacagccagctaattttgtatttttagtagagacagggtttctccatgttggcaaggctagtctcaaactctcaacctcaggtgatctgccgccttggcctcccaaagtgctgggattacaggcatgagccactgcgcctggacacttagtgtaatgtttgcaggatcatttggctggatatagaattcttagttgacatttttattctttttcaccactttgaatatgtcattccagtgccttctggccttaattgttttcaaataagaagttgtcattaattgaattatttcactgtacatgatgagtcatttttctctctctctcaccgctttcaggattttctgtctttgcctttcaacagtttgtgatgtgtctaggtgtagctctcttcacatttttcctagtttgggttccttgagattttggaatgtgtagattaatgtttttcatcaaatatgggaggtttttggacattttcttcaaatatttttttctactctctctctcttctctcttcttctgaggctctccttacacatatgttagtatgcttgaagtttttccataatctctgaagctttgttcattattcttcaatgttatttctctttgttcttcagatcagctatttctattgctgtatcttcaagttcactgattcttctgccattttgaacttgctgttgagctcctccagcaaatttattgtattataatttcaactccagaatttccatttgtttgttttattagtagcagatcatcagtacccttacatttgctttcttcatgccttttcttttttcttttttttttttttttttttttttttgagatggattttcactcttgttgcccaggagtgcaatggcacaatctcagctcactgcaacctctgcctccagatccaagcaattctcctgcctcagcctcccgagtaactgggattataggtatgcgccaccacacctggctaattttttgtgtttttagtacagatggagtttcactatgttggtcaggctggttttgacctcctgacctcaggtaatccacccaccttggcctcctaaagtgctgggattacaggcgtgagccactgcacccagcctttttttgtttttgtttttgtttttagacagagtcttgctctgtcaccaggctagagtgcagtggcgcagtcttggcatgctgggattacaagcatgagccactgcacgcagctttttttttttgagacagagtttcgcccttgtcacccaggctggagtgcaatggcacaatctcagttcactgcaacctccacctcctgggttcaagcgattctcctgcctcagcctgctgagttagctgggattaccagccctctaccacacctggctaatttttgcactttttaatagagatggggttttaccacgttggccagcctggtctcaaactcctgacctcaggtgatccgcccgcctcggcctcccaaaatgctgacattacaggtgtgagccaccatgcccggcctcttcatgcccttttcattggatagaaatttgagcttcttgagaccatcagcagtatggatttggccaggcatggtggcccacacctgtagtcccagctgcttgagaggctgatgcagaaggatcacttgaggccaggagtctgaattcagcctaggcaacataatgagactctgactctaaaaaattaaattaaaaacaaaaacacagtatggactcacaaaatggaagtaccagtgctaagtagacttaataggaccgtcttgttcattcttttaggccatactgcccattaaaatactacattgtctaaccattctcatccatgggtagattatacccaacctccctttcctatgattgtttgaggggtttttgcttttgagatgggggatcttgctctgtcacccagctgaagtgcagtggcgcaattatggctcaccagagcctcgaactgctagactcaagtgatttcccccatgtcagcttccctagtaaccagcactacaggcgtgtgccaccacacctggataattttttaattttttttgtaaagatgaggtctcactttgctgcctgtgttggtctcaaactcctggcatcaagcaatcctctagcctcagtctcccagagtgtcagattacaggcgtgggccactgacccagccctaggatcttttattttctgctttctgactatagctatacctaaaaaccctttgcctcctaataagctgggtagtaaataggtttcatcttcctaaggatcaccttcagtcagttgacgaatttttttgttttgttttgttttgtttttgtttttgttttgttttgagatggagtctcactctgtagcccaggctggagtgcagtggcatgatctctgctcactgcaagctccgcctcctgggttcacgccgttctcctgcctcagcctcctgagtagctgggactacaggcacccgccaccacacatggctaattttttgtatttttagtagagatggggtttcaccatgttagccaggatggtctcgatctcctgacctcgtgatccacccacctcgaccttccaaagtgctaggattacaggcgtgagccaccgcacctggcccagttgatgaatttatacagagctcaattgtagattctaaggtcacatgtaggcctaaggaatagcaagtcatttttgagacagggtctcactccctcaccaaggctggagcatagcagtgcaatcctggctcattgtagcctcgagctcccaaactcaggtgatcctcccacgtcagccacttgagtagcagggataacaagtgtgcaccaccatacccagctaattttttgtagttttttatagagatggggtttcaccatgttgtctaagctggtctcgaactcctggctcaaatgatcctcccacctcagcctcctgaatagctgggactacaagtgcatgcaggctaccacacctggcttaaatttcctttctttcttttttttttttttaattttgagacaaggtcttgcagtgtcacccaggatggaggctgaagtgcagtggtgtgatcacagctcacttcactgcagccttgacctcctgggctcaagttcaaacgatcctcccacctcagcctaccaagtagctgggactgtaggtgtgcaccacgacactcagctaatcttttttggttttttgtaaagacagggtcccactatgttgcccaggctggttcttgaactcctgggctcaagcggtccttccacctcagcctcccaaagtgctgggattataggcatgaaccatcacacccaacccttaaatttgttaagtttattaattatcttgctgtcccacaaaagttctctgtgttcctacttcatcgaccctgtgaaaagcagccctgtgcttcatactctagatggcatctctcagcctctgccccatacatcttttacttggctatcatgtggatataaattaaatcctgtgaatacgtaacatctcataggatgtagaatgcagaaatgcagtaaagaccatacttctgtgcctcttggctattgttgctgtcaaaaaaggtcatggaactacatcagttttccagcatccgttgtccagcttcataggttgagagagaagttgttacagtcaaagcatcttgcttccagcagagctgtgaaggagcctcagagactgtaggtcacctattggaacatgtatgcattattcctggagatgtttctggaggcccaacctagtaccatactttcagcctctctagtgattttctttttcttttcttttcttttcttttttttttttgagatggagtcttactctgtcgcccaggctcaagtgtagtggcacgatcttggctcactgcaacctccacctcctgggttcaagtgattcttgtgcctcagcctcccaagtagctgggattataggcacatagcaccatgcctgcctaatttttttatttttggtggagacgggggtttgccatgttggcgaggctggtctcaaactcctggcctcaagcaatctacctgccttggccttcccaagtgttgggattacaggctgagccaccacgccctgcctctccagtgaatgaatgaaaagcacctcattttccatatcaaatcttttgcaccctggagagatagttggtagttggattaaagttgtgtgcagatatcatggcaaaaaggatgtgtagtcaggctgccatctcagaattttgacaatttttttttttttttgagacagagttttactcctgttgcccaggctggagtgcaatggcgcaatcttggctgactgcagcctccgcctcccgggttcaagcagttctcctgtctcagcctcccgagtaactggaattacaagtgccttaccatcacacccggctaattgactttttttttttttttttttttgagacagtttcactgtgtcgcgcaggctggagtgcagtggcatgatctcggctcactgcaacctccgcctcctgggttcaatcgattctcctgcctcagcctcccaagtagctgggactacaggcacctgccaccatgccctggggctaaacttttttgtatttttagtagagacagggtttcactatgttggccaggctggtcttgaactcctggcctcgtgatccgcccgcctctgcctcccaaagtgctggtattacaggcgtgagctaccgcacccggcctaattgacaattttatccaagttttttttttttttccctctgtgggccttagcttcctccaacctcataaacctctcagtttttgtgggccaggaatttgggaaaggcttggctggatagttctgattcagggtctcttatgcagttgcagtcagatggtggctcaagttgaaacagcagggaaatggagcatctgggagctagagctgaaacaacagcggggtggagcctctgggggctggccagacatctctcttttcatgtggtgtcaggaactctccatgtggtcttgatgcatgaaatagtctggggtttctcacagcttggtggcctcagagcagtcagactgcttacatggtgggcaaaggctttaaaagcaaacattcccaatttggttcccttttataatttctactttaatgtgtttatgttgcttagtggtcagattaactagggattcaacaagatcttgttctaaacacctggagcctataagcccttgattttgtattgttggatctgtgtgttggtagggaagcataatcaaagttcaagtcattttgagatctacccttcccacgaggtccttttgcatctcttttgtgtgtgtacgcagcctcagggtggccatgagtatgtggctaacttgggccctctcaggtctccgctgtcacacagtctcagccaggaacacacttgccccaaccatgaccacacctccggccagtgaagcctttcactcttcctgcttactgccttggagatcatcatttccatcaacaatattgctacatgtaaaggaaatcaagtgatttccttccttctgtatggaagctatttgttttcatggctagcaccttcttgccagagtttctacaccgattgcaggaagggctgagagcagcctcacctgagcctgggaaattgaggctacagtgagctgacattatgccactgcactccagtgtgggcactgcagcctgggaaaccctgaggttttgtttgtttgtttgtttttccccatctggggaaaaaaaaaagccgctgattcctactgttcttacctgaagttcagcagttttgcaagcacaaaattgctctcggattgttaagtccctttggttaacttccagagtgctgaagtggttggttttgtcagttttgtccggttttgtcagttttgtcctgttttattgttgcttctgcaggagatctcctcactctgccttggccagaagttccaccctgtactcactttgttttatattcaacttcgcttcctctgcctgacttcaaaattgggagggtcccaaggctcagtctctgaacctctttccttcttcatctacgctaggcaatctcttccagccccacagtgttcaatatgattgatataccaatgattccccatttatatctccagctctgacctcccccttgagcttcaagtgactgacagatctgaatctccaactcatctccacctatatatctgatagactactcacactcacataacgaaaagtctttaatttttcctccaaggctatcttcccctagttctaatctattcacttgttcaagttcaaaacctaggagttatccttgactcctttccttccttcactcccacccccacatccagtctaagaaatcagatgtcaaacctattgccggaacataattccaaattcattcacttttctccatctccactgacaacctgcctagtccaagcttccatcatctattctctgaagactacagcagccttctccttgttctttctgcttccattcttgtccccatacagtctgttgacaacaactgtcagagtaatcttttcaagggcaaaccagatcttgtcacctctcattacactaacaataaaatccgtagttcatactgtggcttatggagccttatattcattcaacatcatctactaggcctcatgctgtctctccaacttaatttcctaccattcttctctcattcaccatattccaggcatagtgggcttctctccattctttgaacatggaatatgccaaactcatccctgcctcacagacttaatactgtttcaggttggaacactcttttcctgtaagccttgtggctgacacttccccatgatgattttttttttttttttttaattttcagagtcaaagtctttctctgttgcctaggctggagtgcagtggcacattcacggctcactgaagcttcaaacttctaggctcaagggattctcccacctcagcctcctgaatagctaagactacaggcatgcgccaccatgcccaactacgttttttttttttgtgtgtgtgtgttttttaatttttgtagagatgtggctctccctgtgttgcccaggacagtctgaaacttctgggctgaagcaatcctcttgcctcagcctgttgagtttctgggattataggtgtgagccaccacaaccggccctgtgatggtctttactaactctcctgccccgtcattctctaccccgtactctgcttgttttcatagcatttctaattctctgtcattgtcttgcttattttttactttataccccatcttctttgttggtatggcccccagcactaagtgcagtgttgacacaaagcacgtattataaatatatttgtgtggactatgtgaatgtactctctaaggccagagagtgcattccagcagagaggtacatttatttagcaggtgcttacctgcccttgctgtgggtttgggagtctgattctgaatatgcttgaaacctcatctcttgaacaaaacaaaatccacaatctccaggtgaggaagtgatgactgaactctgacccctgggtattaccttccccatgtgggtttcttattgtgagaagcctctgaccctcttttttttcttcttttttcttcttcttcttgtgtgtgtgtgtgtgtgtgtgtgtgtgtgtgtgtgtccgagttttgctgttgctcaggctggagtgcaatggcacaatctcggctcactgcaacctctgcctcccaggttcaagtgattgtcctgcctctgtctcccaagtagcagggattacaggcatgcttcaccacacccggctagttttgtatttttagtagagatggggttttaccatgttggccaggctggtctcaaactcctgacctcagatgatccacccaccttggcctcccaaagtgctaagattacaggcattaccaatcgtgcctggccacctctgaccctcttttaaaagttctgggccaattttgtttatagagtcatttctcttggtttttcagagcatagctaagacaggcaaggtctttcacaaaaatttaccatttaaaagaaaaatgcagaaataaaaagagatcattaggggcagaaatacagcccttctgcctaaaagggctgacataggtaagctttagattttgtggattaaggagagacatcttaaaagctccccaccaagaacctcttccagggcatcgacttttttttttttaagacaggggcttgctctgttatccaggctggagtacagtggcactaacatggcttgccatagccttgacctcctgagctcaagcaatccttctgtctctgtctcagccttagcctcccatgaagctggaaccacaggcatgtgccaccacccccggctagtttttggtttgttggtgtgtttgtttctatgtagagacagagtctcaccatcttgcccaggctggtctcaaactcctgggctcaacccatcctcccacctcagcctcccaaaatgctgggattacaggtgtgagccactgtgcctagccttgaccactttttggctgagaccaggagattaaaaatgtgggcctgccctcctctcccagttttagactctgcctctgcctctgcctcacattgccagcgccatgatagaactcatgccttggccgggcgcggtggctcacgcctgtaatcccagcactttggaaggccaaggtgggtggatcacgaggtcaggagatcgagaccatcctggctaacacgatgaaaccccgtctctactaaaaatacaaaaaaattagttgggcgtggtggtgggtgcctgtaatcccaactactcgggaggctgaggcaggagaatggtgtgaacttgggaggcggagcttgcagtgagccgacatcatgccactgcactccagcctgggtgacagagcgagactccctctcaaaaaaaaaaaaaacaaacaaaaatgaactcatgccttgggagagattttacctcctcttctcttctcaaaaaggtaagactgttctccaggcacaataatttaagcacaggttaataccatgtttcatatagtgtggcacttatataatacgttatgtgattttattttatttatttatttagagacagagtctagctctgtcacccaagttggagttagtggcacaacctcagctcactacaacctctgcctcctgggttcaaacaattctcctgcctcagcctcccgagtagctgggattataggtgcctgccaccacacctggctaatttttgtatttttagtagagacagggtttcaccatgttggccaggctggtctcgaactcctgatctcaggtgatctgcccacctcggcctcccaaagtgctaggattacaggcgtgagccaccacgccccaccctgttatgtgattttaaatgtttcaaagtcagatcaagaacaatgagaaaagtattcctttttcgagtctttcagtcctcctgattctatctgggaagaagtttcagttgggtgctaccatatcttaaaacctctcagcacagttgctgttctcttcttcctggggaatgctccaagcctcatttttatcatatttatttttattggtatctgcttaagtttatgatctaaagattcctttttaaaagaagttcctaagtaaagaaagttggcatacataaaattataaaataagtaatagtgtaggtggtgtgagaacacagcatgagtcacggtggcagtaggaaaggctggctgaggtctgccagtgtcctagtatggcatcccatcattcagtgcctgtgtttgaggcagggttcaaaggcagtgctgttgaggtagtgtttgtcaactcaatgatttcttgttttcccctctatagtggagcacatgatccagaagaaccaatgtctcttcaccaacacccagtgtaaggtttgctgcgccttgcttatttctgagtcccagaagctggcacattaccaggtatgccatcatacttttagaactgcgtttcttttcagacctggtgccaaaccactaattctctctggcttgcatggtgaagtgtaattgctgcttagccacccagatgttgcctccatgcatgttggcttgtgacttgaagattgacttaatctccttgagtctcatctcccccatccaaatcaggatcattatatgtgtatcttcccttgcagcttggcatagcataaagtatgagctttggctttaaatagatctgactttaaatcaaaactctgctactcatcttgagcaagaaacttcatcatttttagatgtagtttcctcatccataaaatagaaatggtcataattttctcatagattgtgaagattaaatttggtagctgtaaaatgccttgcacagagcaggaactcaaacttccctcacctcctcctcaaaactttttgtgaggatgaatcagatgaaaatctcataagtgtttttgagtgccttaagtatgaagtagcatttggctatctttgatctttctcctgggtttttgcagagcaaaaaacatgccaacaaagtgaagagatacctagcaatccatggaatggagacattaaagggggaaacgaagaagctagactcagatcaggtaatacagctgccatattgagcccacttgcttcatgatgaagccagccagcaggttggtgtggtgaacaagtcagactgtcttggcttcaaatcctggccctgttgtgtgactcgggcaagtctattacttcacaaagccttgatttcttcctctataaaaatgaggatggtaatatcaactacctttcaggattttttagaactaaaattgagggcagatttataaaaagcacccaattcagagcctggcacatagtagggactcagtaatggagctggtattacatattaccgcctagtggtttgttagagcaagacaagagaaaatggaaagaagccaggctgcttgctttcttgagggccaaggaaaagaactaagttcagcacttgaatgttttgcataaataagcagaaggaacacctttccaaatgtctgctgtgattgagaggtgatcacatgtgctttttggctcagaaataatatgagcattatgctgaagcaacccccaatccctcaggagtaccatctcatcatgggaagagaagttaagcagactagggctcaaagctggctgtgtgtcttactgatcgggtgagtttggccaagtcacttaacctctgtgaacttcccccataaagtagagataatgcctacttcttaagggtattgtgaggtaaaatttcaattcctagtagatgctcaataaataagagtttactctatagactgctacctcctattatagtagccacaggtcaggaaggtccttgtttatctcttctcaaaatttactggactcatcccctggtttcccttattatttatttatttatccctggtttccctcctttctatttctctatctgtctatttgtgagacaggacctggctctgttacccaggctggagtgcagtggtgcagtcacggctcactgcagcctcaacctcccaagctcaagtgatcctcccacttcaacctcccaagtagctaggactacaggcacacaccaccacgcctggctaactggagtgcagtggcacgatctcagctcactgcaacctccacctcctgggttcaggcgattcccctgcctcagcctctgaagtagctgggactacaggcacgcgccaccacacccagctaatttttgtatttttagtagagatagggtttcaccaggttggccaggctggtctcaaacctctgatctcaagtgatctgcctgcctcagcctcccaaagtgctgggattacaagtgtgagccactgcgcccagccgcctggctgattttttaaaaaatttttcgtagagacagggtctcgctttgttgcccaggctggtctcaaattcctggtctcaagtgatcctcccacctcaggctcccaaagtaccaggattacaggtatgagccaccacacctggcccttttctcacaatttataattcagaaaggcaagataaactctatgaccctgggcaagttattttacatatttgcaccctattcagagatcaggctttctgagagagatgctgggatccctttatgtagtcttgaaatacatggtttcctagcctaatcataatcaacaagtagaacgcaatgggaggctgggtgcggtggctcatacctgtaatcctagcaatttaggtggctgaggcaggcggattgcttgagcttgggaattcgagaccaccctaggcaatatggtgaaaccccgtctctataaaaaatacaaaaattagccgggtgtggtggcatattcctgtagtctggctacttgcaggggtgggtgggagaattgcttgagccctggaggtggaggttgcagtgagccgagatcgtgccactgcactccagcctgggcaacagagtgagaccctgtcttaaaaaaaaaaaacctaatggtccacttgttcagcaaactctgagcatctactgtgtgccagactccagctgggtgtgaaggataagaaacaaaaatgagtcaaatagtccgtgttccaatgtcacacttgagttcacagaaaagtctcctaagctatgacactgtcagtttagggtggcaagtggtatgacagaggtctatttaatgtactctgggagcacagaagaggagcagggttaattcttcctggaatacacaaagggacttgacagttgtttactgaatgatgtttttttttttttgagagaaagtcccccagaggaaaagcttatatttaaattgggtcttgaaggctaagcagacacgctgccaagcaggaaaggaaggaagcacattttagacagcaggaatggccaaagcaaagcaaggaagcatcagagaataaagtgggggatggtgagtagagtctgggacaaagtagctggagaagaatctagaaagtaggttggggttaatgtgtgagggggggccataaatgcctgttctgttatgggcagtggggaaccattgaagattttctggtggggcagtggtatgatcagacctgtgttctttcttccaaccagaagagcagcagaagcaaagacaagaaccagtgctgccccatctgtaacatgaccttttcctcccctgtcgtggcccagtcgcactacctggggaagacccacgcaaagaacttaaagctgaagcagcagtccactaaggtggaaggtactggttttcctgagtagtgctatagtgggacccctgccgtcctcagggcactattgccaggggctcacagagatcctcactgaggccacagacttgaagaagttgaattgcttttgagaacccttaaaaatctccaagtagacccagcttcactgaaatgcaatctcagaattatgctcacctaacctccctttctttggttataggtttttctctataggctgagcttttgtcctgactaataattataactcaggagtgccaaagtcctccaggccacgcataccatgagagcattctatctcctacctctcccactagatttttccatcccagcatccacctgcccttattactgcatgttccaagttgaaagctaaatccttgtctttttcacatgctcaggttatggcctactcactttaatcctcaaaagctgcctgttctcctcaagacagggacttgcctttcaaagctgaatacttcagtgctgctactactgccccacaatctgtaactgccatgaattcattcccagtacagtgacttctgaaatagccccctttatctcgtcacgactagggctcagccctcactttcatctcattaactcctgactttctggggttttaacctctgctaattgcaattagtcaagagtgaaagttctttgatgtttatttcattgttttcttgataatttttgcttctctattttggaccaagaagtagactacactattagtaatactattatcctttttgtgtttactgacaactgtgttttggaagccttcaaaggtagggtgaaaaatcactcataattttttttttttgagatggagtctcgctctgttgcctaggttagagtgcagtggcatgatctcggctcactgcaagctctacctcccaggttcatgccattcttcagcctcagcctcccaagtagctgggactacaggtgcccaccaccatgcccagctaatttttttgtattttttagtagaaacggggtttcactgtgttagccaggatggtctcaaactcctgacctcgtgatccacctgcctcggcctcccaaagtgttaggaatacaggcataagccaccacgccggccaaaacctttttttttaaatagagatggcttctcactatattgctcaggctggtcttgaactcctggccttaagtgatactcccatctcagcttcccagagtgctgggattacaggcatgagccaccacacctggccactcataattacacctttttatcacacccacatctagttattcatggtatgaaacagcagaatgtggactttgaagtcacagagtcccaggtttaaagcctggcactgttactgtttatatgacttttttgtgtctgaactgcctaacctataaaatgataataatactgtctacttcatcggttgtgaggatacaataatgtgtattaaaaacacaggacataggccgggcatggtggctcatgcctgttgtaatcccagcactttgggaggctgaggtgggcagatcacttgaagtcaggagttcaagaccagcctggtcaacacggtgaaacccaatctctactaaaaataacaaaaattagctgggtgtggtggcacgagcctgtagtcccagcttcttgggagactgaggcaagagaatcgcttgaacccgggagctggaggttgcagtgagctgagatcgcaccattgtacaccagcctgggggacagagcaagacctcgtctcaaaaaaaaaaaaaaaaaaaccaattttataaggtcacagacttctcttcccacaaatgggaaaattctctgcattatgccttgtccctgaaatttcatactcgagattattttccatattcactttcagcttttgccacatactttgtttttatatagttgtgatcataatgcaggtaccctttatatcccgcttttacttttcatttaattttacagcttaagcacatttccatgttattacacaactttataactatatttctgaaattaaacactttttaatgtaaagtaatataatcatgttgtaagagataaggaaaacatggataaatggaaagaaaagttacccataattttaccattcacagataaacactgttaacattttggtttctcctataatctgtttctcctataatcttattgttatatgtatctttgtatatctgtgtgtatattcgttttgtgtatatctaggttaactccgtgtatatgtgcatataaacatagactactttaaataactttcatgtttttataaaaacaatgcatactcattatgaataattccacttcaaacaattgcaaaagatacaaagaagaaagtaaaatatcacctaaatcctacaccaagagagaaatactgttaatatgttggtgatgttttaaaataccagtatgcacatatggattacacgtgtggggtttttaaaatttttttatttatttttatttatttatttatttatttatttatttattttgagatgaagtcttgctctgtcacccaggctggagtgcagtggcacgatctcggctcactgcaacctccgcctcctgggttcaagcgattcttctgcctcagcctcccaagtagctgggactacaggcgcgtgccaccgcgcctggccaatttttgtgtttttattagagacggggtttcactatgttgcccaggctggtcttgaactcctggcctcaaacaatgatcttaccgtatggtatgtacaattgccttttttgtttgtttgttttttgttttttgttttttttgagatggagtctccctcttttgcccaagctggagtgaaatggcgcaatctcagctcactgcaacctctgccccaccaggttcaagcaattctcctgcttccacctgctgaatagctgggattacaggtgcccaccaccatacccggctaatgttgtttttttgtttttttgagatggagttttgctgtcgcctagactggagtgcagtggtgcaaccttgactcactgcaacctccaccctctgggttcaagcaattctcttgactcagcctcctgagtagctgggactaccggcacctgccaccacgcccagttaatttttgcatttttaatagagacagggtttcaacatattgctcaggctggtcttgaattcctgacctcaggtgatccacccacctcagcctcccaaagttctgggattacagacatgagccaccgtgccctgcctaatttttgtattactagcgatggggtttcggcatgttggccaggcagatctctaactcctgatctcaggtgattcacccgcttctgcctcccaaagtgctaggattacagacatgagccaccgcacctggccatacaattgccttctatatgttttttatttaatatgacatttgtatttccccatgttattaaaaaattctttataagcatttttagtgactgcatcgtactacatttaatattcgtctaatgctgaacatttaatctccccaccccccactttttggtgttacagataacactacagtgaacatctctgtagaacactttattacatttcaggttattttctgagaacagactctatatccctcattttattggatgcgcattaaatggttctagacttacttacactttcacttctgatgcttctgttcagtatctcaaagaatgaccgttctctcttaacaaccattatacctcttttctgatgttaaaaatctacattcattacagaaaagttggaaaatagtaggccgggtgctcacgcctgtaattccagcactttgggaggctgaggcgggtggatcacctgaggtcaggagtttgagaccagcctgaccaacatggagaaaccccatctctactaaaaatacaaaattagctgggcatggtggcgtatgcctgtaatcccatctacttcggagactgaagcaggagaatcgcttgaaccccagaggcagaggttgcagtgagtcaagatcgtgccattgcactccagcctgggcaacaagagcaaaactccatctcaaaaagaaaaaaaagaaaggaaaagtcggaaaatagtgaaacacactctactctctgtgcttttgatcttttttccatgctgtcacctatgcgtttgttgttgttctataaaattgaggacataagaagcagattgatgtgtaacttgtttttttctttttttttctttttttttttttttgagacagaatttcactcttttcgctcagagtggagtgcaatggcgcaatctcagcttactgcagcctccgcccacctgttcaagcagttctcctgcctcagcctcctgagtagctgggattacaggcatgcactaccacacccagctaattttgtatttttttagtagagactgagtttcaccatgttggccaggctggtctcagaactcctgagtcagattatctgcctgcctcaacctcccaaagtgctgggattacaggcacaagccattgcgcctggcctgtaacttgctttttttacgctcaacaccacaaacagaatattttctcatattataaaatattctacaacatgtacattacttttttgatgacttgctgaaacaaaatcaacaagcagagaaactgaaattccctatactagaaaaaccattgtgggaaaggccagcaaatttcttctggcttgcccaaaatcctcaaaacttccccagttgaagtgatacaggtatggaagagcatctgagacatatcatctgtgagtcctgctgagccccatcagtcctccaccactggtgggggcttctgggccccacatttttaaagcagtagttgctaggttgacaccatttcagccacatggacttgttagtgagtcgtggcatccgctttatgaggcagcagcgcagcctagagtcaacatcaagccatatgttgatgcacaagaggctcgcatgtatgcctataccaggctctgattcactgaattcattggccagaatcagggatgttttctgaaggcgaaagtaagagctatagccttcaggtcttcttgccacactggcagcctggcatagcaaagagagcacaggctttagggtcacagacctggcttcactcactggctgggtcaccttgggcaagccacttcactcatctgagcctcagtttttctgaataatgtggcaaagtgatacctacctcattggggtagttctgaggaccaaaggagaaaatatatgtagaaaacacatcactaatttttttttttttgaggtggagtttcgctcttgtcgcccaggctggagtgcagtggcgcaatctcggctcgctgcaacctccgcctcctgggttgaagtgattctcctacctcagcctcccaagtagctgggattacaggcacacgccaccatgcccagctaatttttgaatttttaggagagacagggtttcaccatgttggccaggatggcctcaatctcttgacctcgtgatccgcctgccttggcctcctgaagtgctaggattacagatgtgagcaaaacgcataactaaatgttaatggtcctcttttctctctactcagcctataatatgcaatgtagcctaaaaggcatccctagtatggttaccttttctgaatgaccttgtatgagctccaggaactcaagcctcaatttctgtatctgtgcatttgttcccagctctgcaactgtattactttaaggatgagaataaaactcccaaacttcgtgtcccacttgctgtgaagttctgggaagtactgaggtatccctgcaagagtgcaagtgtgcatctctagtctattgtaacttggcagcctgacaggagaagctcagggcctcctaagaatatgagaaccaccaggatttgtgggcttaaagtagttaaagccgctgaatgaaatagccagtctttgggctccctcaaatcttcccaggtttcccaattagagaatgcattcacctgtgtgactcacacaggcagtgccacatctgcagtaggattaactggtgtcacagccctttctattcagcatactcaaaagcctgacaccttctgggttttttcattgtttctgtttgaactctctcactgcagctctgtcaaaacgccttacaaatcctttccttgtggcctccaccttagccttgcaccagaatagagagatgatagacccagacaagttctgcagcctctgccatgcaactttcaacgaccctgtcatggctcaacaacattatgtgggcaagaaacacagaaaacaggagaccaagctcaaactaatggcacgctatgggcggctggcggaccctgctgtcactgactttccaggtgagggggcctagctcacacccagagctggaccagggtttggccactggggctacccggaccagctgacgttgtgcttttcctccttaggtcttgtaagtagggtttgcgaactcagatggctacagaagccagatgagaaattaaaatgagagccaggaaggggatatggtcagctgaagagtgaatgccattcctactcagctgttaccatatctttcaggttttcttttcttttttttttttttttttttttgagacagagtcttgctctgtcacccaggctggagtgcagtggcgcgatctcggcttactgcaagctccacctcccaggttcatgccatccttctgcctcagcctcctgagtagctgggactacaggtgcctgacaccatgcccagctaatttttttgtatttttagtagagacggggtttcaccatgttagccaggatggtctcgatctcctgaccttgtgatccgcccacctcggcctcccaaagtgctagaattacaggcgtgagccaccgcgcccagccctctttcaggttttcaaaagactctggaaagccagatttatatagaaatccctctgtttttgtttttgcgtttgtgttttttgagatggagtctccctctgtcacccaggctggagtgcagcggcgcaatctcagctcactgcagcctccacctcctgggttcaagcgattttcctgcctcagcctcccgagtagctggggctacaggcacacaccaccacgcccggctaatttttgtatttttagtagagacaaggtttcaccatgttgggcaggatggtctcgatttcctgacctcgtgatccgtccgcctcggcctcccaaagtgctgagattacaggcgtgagccactgcacccggcccctctgatttttaaatgtgtaactaaattaaaaaatttttaagcccagccaggcatagtggcttatgctgtaatccaaacactttgggatgccaaggtaggaggatcacttgagcctaagagttcaagaccagcctggccaacatggtgagatcccatctctactaaaaattttaaatattagctgggcatgtggcgcatgtctgtagtcccagcaccttgggaaggctgaggtgggaggataacttgagcccaggaggtcaaggctaaagtgagatatgattgtgccactgtattccaacctgagtgagagcgagaacatgtatcaaaaaaacaatttttttttttttttgagacagtctcactctgtctcccaggctggagtacaatgacaccatctcacctcactgcaacgtctgcctcctgtgttcaagcgattcttatgcctcagcctcctgagtagctgggattacagttatgtgccaccccacatggctaatttccggctaattttttttgtatttttagtagagacaagagtttcaccgtgttggccaggttggtctcgaactcctgacctcaagtgatccacccgccatgacctcccaaagtggtgggattagaggcattagccaccaagcccagccaaaaaaaaaaaaaactatttttaaaccctgtgtaagtcagacctgtctgcaagccagatttgggccaaggacccttagcggattagatcagaatctcatgttctgatagttcttactttgtacctccacaaaggtgaacccctgagagagaaaaggttgcttcctatcagcagaatttagacccctacattaaagttttgcctcccccattctttggttgtggttatgttaaggagatactggtactaagaaaaactactaaaactacacgtacacatggtccccaacttcctatggttcagctttatgatttttttcaactttacgatggtgtgaaagcaatagatgttgagtagaaactgtacttctcttgcactgctaggcagcaattggtaataagtttatctagatgtaaccccattgtaagtcaaggaacatctgtagagtgagagaaagcatggaaatcttctgctgacttgcaggatccattcaccactcattggtaaaggatgaattccttgtttttaccttttttttttttaagagggtctcttgctggatgcagtggctcacgcctataatcccaacactttgggaggccaaggcaggtggatcataaggtcaagagggcgagaccatcctggccaatatggtgaaacccagtctctactgaaaatagaaaaattagctggacgtggtgacacacgcctatagtcccagctacttaggaggctgaggcaggagaattgcttgaacccgggaggtggaggttgcagtgatccaagatcgcgccactgcactccagcctggcaaaagagcagcaagacttcatctcaaaaaaaaaaaaaaaaaaaaaacagggtctctgtatgttgcctaagctggtcatgagctcttgggttcaagtcatccttctaccttggccgcccaaagggctgtgattacaggcatgagccgttacacccagcctgctgttatcaagtatgcatttaagtcttgcccaaagtatttgtgtattttggtacttttaatgctgttttaaaatgaacattccttaaagttgactggaccatttctaatacaataaggataattttaaaagacctggaagaaattcagttttcatgaatattatactgttaagagagggaaaaaaatatcgaccttgatgagtttttcttacatgtgttcttgtttgctatgaattcattgggagaaaatatttgctgcctttttactgtgcattccaactgtattcttaaaacatttcaaaatgtatgtatattttaacattttgtgacatactaacatgtttttagaatatactagtccatgcctaatccataggggatacgtttcaaaaccccccatggatatctgaaatggtggataataccaaaccctctatatacggtgtttttctctctgagaaccaacatggctaaggcactaatgagcagatagcgtatacagtgtggtgaacaaagggatgattgacatcctaaacagggtagaatgggatagcttgagatttcatcatgctactcagaatagccagcactttaaaaaacttatgaattgtttacttctggaatttttttttttttttttgagatagggtcttctctgtcacacaggctggagtgcagtgcacaattatggctcactgcagtcgtgacctcccagactcaagcattcctcccacctcagcctcccaaattgtttaaccacaggtgtgtgccaccacacctggctacttttttattttttgtagagctagagtctcgccacgttgcccaggctggtcttgaattcctgggctcaagcgatccacccaccttggcctcccaaagtgctgggattacagacatgagccaccatgcccaatctggctattttttatttatttttttatttttttattttgtttttttgagatggactttcgctcttgttgcccaggctggagtgcagcagtgccatctcagctcactggaacctccgccttccagtttcaagcaattctcctgcctcagcctcccgtgtagctgggattacaggtgcccaccaccatgcccggctaatttttttttatttttagtagagacagggtttcaccatgttggccaggctggtcttgaactcctgaccttgtgatccacacagctcagcctcccaaagtgctgggattacaggcgtgagcccccgtgcctggccggcattttttatttcatatttttggactgcagttgaccacagataactgaaaccatagaaagcaaatctgcagatgttgagtggggagtggtggcgggactactgtaatgattgcatagtataatctattaatccagaacagaaggacctcaagtgaacttaactaattcaatttacttagatttctgggtaaaaactgattctataaattaagaaatagtaggttctttatggtaaagatacctttctgaaaagtaaaaaattgtattgaaattttactaatatgtagattttgctacatattactattatatattacatttacaaatacgtaggtttttttttttttttttgagacagagtctcattctgtcactcaggctggagtgcaatggtgcaatctcggctcaccgcgacctctgcctcctgggttcaagcaattctcctgcctcagcctcctgagtagctgggattatagacacccaccaccaaactcggctaatttttgtgtttttagtagagacggagtttcatcatgttggccaggctggtctcaaactactgacctcaggtgatccacctacctcggcctcccaaagtgctgggattacaggtgcgaacccaccacactcggccctaatatgtagatttttctgagacttcatatagctatctctgaaattttgggcactaaaagaacttgagaaagttacttcataaatgtgtggaaactggaaattgactctatatctttggtaataaaggggtaatgtcagtattttcaacatcctggtgtccagtctagaaagacctagtaggagaaaaatattaggcttttccaaaggatctgtttctgatttcttaacataaatttggccttgttgagtcctttttaatttgaaccggcaaagtatctccccctgcctcagaaataacttattgattaaaatcgaaaactagggccaggcacagtggctcacgcctgtaatcccagcactttaggaggccaagataggtggatcacttgaggtcgggagttcgagaccagcctggccaagatggcaaaaccccatctctactaaaaatacaaaaattggccgggtgcagtggctcacacctctaatcccagcactttgggaggccgaggcaggcagatcacctgaggtcaggagctggagaccagtctgaccaacaaggagaaaccccgtctctattaaaaatacaaaaactagccaggcatggtggcatgcacccgtaatcccagctactctgaaggctgaggcacaagaatcacttgaacccaggaggaggaggttgcagtgagccaagatcgtgtcactgcactccagcctgggcaaaaaagccagactccgtctcaaaaaaaaaaaaaaaaaaagttagccgggcatggtggcatgcgcttgtagtcccagctactcaggaggctgagtcaggagaatctcttgaacctggttgcagtgagctgagatcacaccactgcactgggcgacagagcaaggctccatctcaaaaaaataaaaatctaaaaagaatctaaaaagccaggaaactacaggtgctggagaggttgtacagaaataggaacacttttacactgttggtgggactgtaaactagttcaaccattgtggaagacagtgtggcgattcctcaaggatctagaactagaaataccatttgacccagccatcccattactgggtatatacccaaaggattataaatcatacagctataaagacacatgtatgtttattgcggcactattcacaatagcaaagacttggaaccaacccaaatgtccatcaatgatagactggattaagaaattgtggcacatatacaccatggaatactatgcagccataaaaaaggatgggttcatgtcctttgtagggacgtggatgaagctagaaaccatcattctgagcaaactatcacaaggacagaaaaccaaacactgcatgttctcactcacaggtgggaattgaacaatgagaacacttggacacagggtggggaacatcacacacccaggcctgtcatggggttgggggaggggggagggatagcattaggagatatacctaatgtaaatgactagttaatggatgcagcacaccaacttggtatatgtatacgtgtgtaacaaacctgcacgttgtgcacatgtaccctagaacttaaagtataataaaataaattaaaaataaaaaacaagaaattattactgaatggaatattcattttatgctagttatttcaagtttttaaatacatagaggaacgtattatagaaagacctctgtggctgggtttgatggctcacgcctgtaatctcagcactttgggaggccgaggcgggtggatcatctgaggtcaggagtttgagaccggcctggccaaactggtgaaaccccatctccactaaaaatacaaaaaattagccgggtgtggtggtgggcgcctgtaatcccagcaggagaatcacttgaacccgggaggcggcggttgcagtgaactgagatcgcactattgcactacaccgtgggtgacaaaagtgaaactctgtctcaaaaaaaaaagacctgtgtctctttttcttttaagttttttctctttttttggtccttatgtagaacaaataaagactctaaaactaagttgtatattatcaattagagatgcaggtggcaatcaagccaaataacatgactttaaaatccagtgttctcagccgggcgcggtggctcacacctgtaatcccagcactttgggaggccgaggtgggtggatcatttgaggtcaggagttcaacaccagcctggtcaacatgcaaaaccctgtctctactaaaaatacaaaaaaattagctgggcatggtggtgtgcacctgtaatcccaactactcaggatgctgaggcaggagaatcgcttgagcctgggaggcggagattgtggtgagccaagattgtgccactgcactccagtctgggcgacggggtgagaccctgtctcaaaaaaaaaaaaaagaaaaatcaggtgttctacaccttcactctgaggtcatagattttcttatttatttatttatttattttttatttatttatttatttattgagacagagtttcgctcttaatgcccaggctggagtgcaatggcgcaatctcggcttactgcaacctccacctcctgggttcaagcaattctcctgcctcagcctcccgagtagctgggattataggcatgcaccaccacggccagctaattttgtatttttagtagagacggggtttcaccatgttggccatgctggtctcagactcctgacctcaggtgatgtggccgcctcagcctcccagagtgctgggattacaggcatgagccaccatgcccagcctgaggtcatagattttcaagaggacttggatttgaagaatatcgatactttttttatttcaaaaaaaaaaatagctgggcgcggtggctcacgcctgtaattccagcactttgggaggctgaggcaggcggatcacctgaggtcaggatttcaagaccagcctcaacatggagaaaccccgtgtctactaaaaatacaaaattagccgggcgtagtggtgcatgcctgtaatctcagctactcaggaggctgaggcaggagaattgcttgaacctgggaggcggaggttgcagtgagccgagatcacgccattgcactccagcctgggcaacaaaagcgaaactccatctcaataaaataaaataaaataaaataactaggcagagagtcaggggtattagatccccttttgataggaatatatacattataattttaatctccacacgttcctataaatagatatgattttgaccacttcacaaataaagaagttgagacccacagtgaatggttcaagcttatacagctgataagcccttgatgttaataaatgttgatatcactgtgggtctttagctctgtgtggctccaaaccttacactccttccacctgcctccagctctcagcatacttggcaggaggctctccaagtgtaggatgtctagcagaggcactgagccccactctgtcccccttcttacagaggtgggctgttgacctagaatatgcaggtaatgacttcagctgacaaggattctaccttagcaaagaatttaggtgtttttgtttttgtagagacagggtttcaccaggttggctaggctggtctggaactcctggcctcaagtgatccacccgcctcgccctcccaaagtgctgggattacaggcatgagccattgtgcccggcctatttaggtttgttaacagcttgtcttctccctgctggcttcgttcaaggccattcattcatttagttcattcatttagtcaagtcacctaacacttactgataggtgttatagtccagggcttgggctaggtgctctcacatttaattacctgatttaatcctgacaataactgttgaacaactttgattatccccattttacagatgaggatattaaaaccagaaaggtgaagtgattttccagggttccacactaaagagtggcagagccagagcccacattgaaacccaatgtagttctgtgttggatccagagaatagttcctgagggtccctgacaagtgtctcatggcaagtatggacctactgtaagattacccagggtatccaaatcccaccaggggcaaatgcatcatctaccacgcagatcaaataagccttagagtggttttatactccaggcttgtgtttctctcatattcacccaagaaggccagaactaaaacctacatagcattcaggcaaatccttcttgcccccagagcattgaatgtcccctccaggttactgaaatcctcctctgcttcaccccattactttccctaattagggtcttatctcccactcagtagagctgctttctgagccccatgctggtcccccagtttcttcagcttttatatacaggacaagttttcaagtcttactaaattcatatatagtcaataagtatttattggacttttacctaatatgtgccaggcattgtggtaaatacgtagtaaacaagacaggtattgtctgtgttcttatggagcttacagtctagcagagaagacaggcattgagcaaacagttacaactgtgacaaacttcagaaaaaaagacaaatgcaagactgtgggcacataaaatgagaggagataagatgggggagcagggatcaagaaaggcaccccagagggcaagtaggatagtatgggacgtagtgacgcggaggacatgagcaggtgtccacgcatggctttgtgggtcatgttagggcagcgggccttcaccctgagagcactgggactgggaagccgctgccagtttgagctttacgggcggatcatcctggttccagcgtgaggaggtttggagcctgggcaacatggcacaaccccacctctacaaaaagaagaaaatacaaaaattacccaggtgtggccaggcacggcggctcacgcctataatcccagcactttaggaggtcgaggtgggtggatcatgaggtcaggagtttgagaccagcctggccaacatggtgaaaccccatctctactaaaactacaaaaattagccgggcgtggtggtgcgcgcctgtaatgccagctactcgagaggctgaagcaggagaattgcctgaacccaggaggcggaggtgcctccactgcactccagcctgggtgacagaatgagactccatctcaaaaaaatcaaaaataagttgggctgggcacagtagctcaacacctgtaatcccagcactttgggaggagaccaaggcgggcagatcacctgaggtcaggagtttgagaccagcctggccaacatagtgaaaccctgtctgtactaaaaatagaaaaattaggcatggtggcacgcaccagtagtcccagctacttgggaggctgaggcaggagaatcgcttgaacctgggaggcagaggttgcagggagcagagatcacgccattgcactccagcctgggcaacaagagcaaaactccatctctaaataaataaataagttgtgggctgggcgtggtggcttacgcctgtaatcccagcactttgggaggccgaggcgggtggatcacgaagtcaggagatcaagaccatcctggctaacacagtgaaaccccatctctactaaaaatacaaaaaaaattagctaggtgtggtggcaggcgcctgtagtcccagttactcaggaggctgagggaggagaatggcgtgaacccgggaggcggagcttgccgtgagccaagatcgcaccactgcactccagcctggacgacagagcaagactctgtctcaaaaaaaaacaagttgcggtgtaattggtttgagggtaagaaaagctaaggatcaggccgggtgcggtagctcacgcctataatcccagcgctttgggaggcctagacggatggatcatgaggtcaagagagagagaccatcatggccgacatgataaaacactgtctctaccaaaaatacaaaaattagctgggtgtggtggcacatgcctgtagttccagctacttgggaggctgaggcaggagaatccctcgaacccgggaggcacaggttgcagtgagccaagatcgcgccactgcactccagcctggccacagagcgagactccgtctcaaaaaaagaaaagaaaaggatcagaagaaaggaaaggatctagctaagatcacttgaaagcagaaccagcagttcagttccctatcctggctcctccctcactaccagaccatgtgggaaaagccactttgtcattggagcagccctgagatagggtctgtgattcccagggtagaaagacagattgattatcataaccagcgttctcactaattactgttaccgcaagccctaggagagtggcaccttcccagagatctctcagtgaaggacgtccttaatgaggccacttagcacagtcaaggtagaaatacagaccaaatgtcacctctctgttctgtcattcttttatcactcagcagacagctagtctgggccaggctctacgctggaacgagggacacaggaatgaggatcttcccaaccccaggaagcacataggcacacagtctgtgcctccttagcactgtggcctctgggttctcatcagggccagcaacctcacctcgcctcacctgtccgtccttagaagggcatttgtacactctgaaaagcaacggtcttcaggttccttctttctggattactaagatcttgattttgatgtgtttcagctggaaagggctacccctgcaaaacatgtaagatagtgctgaactccatagaacagtaccaagctcatgtcagcggcttcaaacacaagaaccagtaagtaaccattttttgaaattctaggatccatagcaggagctcaggacttctgcatcagaacaaagccaggtagttctcggctgaaatggaatcctggcagtcttttttcagtgaacagaagatgaatcatgtaacaggaacaagtgtctcctctatatgtatttctccaccagcttctgcccagcctttagacctgttggactcaagggtttaatagagaagcatacatgatttccttggtgggaccctaagaacacctggctgtcctagtctgtagcactctgactggggaagtgcttttccactggcctggagaccctctccttttctggcaggagttccctctataggtcattatcaaatatgaccaggccctctcattccttaatcaaatatatattgagcatcttctgaatgatggccaagacagacccagtctctgctctcctgaccttacagcctggtgggaggaaacagactaagcaagtaaacaaccaataatcacagattgtgataagggttttgaaggaaccaggtgaacagagagttacctgttcatggtaatcttggaagtgactaacattcattgagcccctcttctgttgcaggccatatgtcaagcagattttctcaggtaatccttccaaccctgagaggaagagataattattcccattttatacatatagacaaccagcattcaaagtggtgatgtgaatgaagcaaggtcatgattcaaactgaagcctgtctggctcacagcatgctcttcccaaggcgtcaggctcagaagtaggctatggcaccactgatatgaagagaatagggcctggcctggagggcccacatggttctgtcccttcctctccgaagggaaacgtgtggtatgagcagtgtgccacaacataacgttttttttttttttagtagagatggggtttcaccatattggccaggctggtctcaaactcctgagctcaagtgatccatctgcctcggcctcccaaagtgctgggattacaggcatgagccactgcacctggccccagcataaccttctgagataggtagaagaattcccattttacagacaaggaaactgagtttcaggcaggcaagctgccgaaatgattgctttgactttggtcattgattttgctttgctcattgagctgaatgatttaaaggtggtagaaacacagagtattggtgtaaaaaatgtccttagttctctctgctctgcctggagtctcctctctcacactgtagcagatcatcctctttacctgtgaatatgttttttactttgggggactcttaggtgtagacttgagttgccccagcaactcagccccacagtgtttcagcatacatacctcccttgcagcctggctgatggcagttacagtagacaacctgaagccaaccagagcccctccctggggctacccacacctgaaattgccagtgttgttcgctgctctcttgctaaactttccagcagtgtgaccttgggcaagtcaataagtctgtaattctcccaacatgggcaatgtagtgagaccccatctacaaaaaataaagttagccaggtgtggcggcacacacctgtagtcccaactacttgagaggctgaagtgggagaatagcttgagcccaggagttggagtgagccatgagttgcagtgagctatgatggcaccactattctccagtctgggtgcctgagtgagatcctgtctcaaaattttaaaaaagcctcaattctgtaagaataaagctataatttgttgaatacctgattgagtctcattaaatttctcaacaaaaggtctgaaattaggataccccctcccaaacccatcttttacaaccaaagaaagcctaattatcagataggttaattgacttccccaaggtcacttagttacttgcagttagacctgggattcaagcctgtttgacttcgaagcccattcattttactctgccactaccaaatggaatgagtttttatagggccctgtaggcagtggtttggtatagtgaaaaggcattggctacagtcctgaacctaccacctaaaaacatacttcgggccagccacttaagctttctgaactttagtttccttgtatgtaaaatgagggtgctgtttctcaccttgcagaattgccatgaggatggaatgatggaagctaagcatccagcattctgccagcccacagtggacctcagtgaaggaaaggtgtcctgtctattactccaaggccctggaagggcagtgctatcattgcagtaggccaatacagctgccacacactgaccctcttcctttgttccttctcaaatacaggtcaccaaaaacagtggcatcatccctgggccagattccaatgcaaaggcaacccattcagaaagactcaaccaccttggaagactagaggtgattctgcccagcatcccatattgggccagccatgagccagcttcccgtgactgctcagcccttggctccctcttgctcgttgttctcaccaggaaagtacacgggcctgaggcaggattgggccacagacagcctctcattggtccgggctaattcactcctgctgctcccctttggcaggggtcctgtaggtcatgacaggggaggcaagggtattgagagactcggggtctcgcggggtggtagtttggagggtggctttccccatttcccaacccctctgggccttaggtgctgaggcccctgccacctgtctttcctctaaaggtcagttttgggccagttcttgcaactaaagagcagagatctctctgggccctagacatttccagcaaaacctggaactttcatgccaaacctggggcagggcaggaaacagaggaaatggctgcaacatgggagcttggagctaatacgacactctgccttcccccagaaggtgcaggctttcctgagtcttagaccagatatggccagttgcgcaggtttctgccaactgtgaagtatcctcctggagcagtgacacaatcttggcggagcattgctacccccgctgccccctccacagttcctgaatggtgctaaggatctgcagcagttggcaacgagctggggctgggggcggcctccatgtccactgagatcataggacactccaatggggatgggacctttcccctcctccatcagaggtgctctgaccctaggttacacgggaaagtgccccacatgcaagtctccctgagggttctgcccctaaaggcagactgcctcatgcccgctagctgtgaggttcattgctaccctcggccctactagccctctcttcccccttgtgcagcggaccacttgcccagtttgctgtggtgctagccttccccatcatccaccaggtgatttctgggtcccagggaaagaaagagagagctgatgcaggtttctacagtgaggaacaggcgtttcccaggccccacacccagatttctctatctttgctgtgttttatggcctgggactgagtccacacggatagatttttccttgtaaccttgagacgagaattccaaggagtgtcaccatcagaggcttctcttcattgtgtcaaagaagcccctagctgctctcgtggcctccttcccccactccctatcccttcacctgtgaaatgcctttgctttgcatattgtgtgtggatgtgtgtgtgtgtgtgtgtgtgtgttgtgtgtatgtgtgtgcttctgtgtgtgcctaatgctctgtctcttggtcactgaagcatccaaataaagaatttccctcatgggccagactacaacttaacagacctagggttttgagccatattgccattggatctagtatgtctgtcttgacccctcacccccaccccattcagacctcagtagtccccagtagtcactttaggagttgggacagagtcgagcaccctgtgaaagtctcccttgagttcaggtgccctgaactcagtacagcctcatcttctcatccaccaccttctcctgcttctcctgtcacatagggcctcatgaaggtctttaaagggtttaagctggggatctgctttatgtttgagagaactgttctggctgttatgtaaaggagtgcagggaggggcaggaaaggagacaaggaggccagtatggacactgtgtccagtatggctttccaggctaatcacttagggcagagacccagccttattcatctctacttcctgatgtccatagtggtgtgtcatgaatttttattgaatgaacaaatgaggtgtatgaggagagatggttttctcctgctcagctcttacacagtgataggtttgttccatgggacttatcataggcctggtgattcttgaaagagcatttttcatgactcaaaaatgagctgagaaggagtgttatggccaggtgcggcgtcatgcacctatagtcccagctgctcaggaggctaaggcagaaagaccattcaagcccaggagttccagcctgaagtatgctgtgatcatgcctgtgaataaccactgcactccagccagggcaacataacaagactctatctaaaaaaaaaaaaaaattataaaaataaatttgaaggctgggcgccgtggctcacgcctgtaatccaagcactttgagaggccaaggcaggtggataacctgaggtcagaagttcgagaccagcctggccaacatgatggcaaaaccccgtccctataaaaaatacgaaaatcagctgcgcctggtggcacacatctgtagtcccagctactcgggaggctgaggcaagagaattgcttgaacccgggaggcggagggtcgcattgagccaagatcgtgccactgcactccagcctaggtgacagagtgagactcctgtctcaaaataaataaataataaattttaaaagaaggtagccgggtgtggtggtgcattcctgtagtcctggctacctggaagggtgaggcaggaggatcgctttaaccatgagttcaaggcagcagtgagctatgattatgccactgtactccagcctggacaacagagcaagaccctgtctctaaaaataataatttttaaaatttaaaaaaagaaaggaatgttatggcctcaagagctctttgtccatcctttactgtagacagccagatttgaggaaggggcccaggcagcctcagctcccattcagtgccactcagcccctgctcctggtcagctgtgaaaggctctacacagccccaagggaggttctcagcttcccatgatcagactgcctcagcaattccccagagtccttctaagccacctagtatgtcagattcagccccatctaccaagcaaggaaatgaagggcagggggtgagtgggctatcataccgtgagcctccggcctgcaagaccactttgtagtccctaccagctgtgtggccagccctgttggtaaagggacctagagatgaacactttcttgcccttaggggttcacacacagtcaaagatcatgatgacaatgataagaatgcccaggatgcaggagctgactcagccaagggcatgaaaaagctggagaggttggaaagctagcatttcatctgcataacaacctttgagctaagagttaatattccatatagagaaggaggccaggcagggtggctcacatctgtaatcccagcactttgggaggccaaggcgggtgtatcacttgcggccgggagtttaagaccatcctggccaacgtggtgaaatcccatctctacaaaaaataaaaaataaaataaataaaaaccatggagagaaggaacaaggctgaaaaaggtatcatgatttgcccaaggtcttgcctctaagaaatgacaaaatggagagtagaatccagttctctagacttcctctggaaccctttatgagtgaggaccagagtacctcccacatggcccctgcagcctgcctcacccatctcctgtcagtgccatggtctcacagggtgagcagccactcagggcaggggcagcacccacaaaacagatgagacaaggctcaatgtttatattccaagtccctccatttttctcataattttgtccattcccatgatcccagtgtagtagactctaattattaaagtgttagaaacccaaatcaaagcgattagctaaaaaggtaaatgtattgattcacttaatgaaaaatccacatacaatgatagctggacccagactcggagatggtctcatcaggaagaattgtctatccctctgctttcctctgtgtgccctttctcaggcaagctctctccaagaggtgccaaggtggccactggcagccccaggcttctatcctgatacgttagtaacaacagtggaaagaacacctttctccactagttccaacaaaatatctgggattgcctcaactggtttagtcctgttctcatccctgaattaatcattgtggctaggggaaaaggcactctgatttggggcctgggtcatgtgcctaaagctgagtcagctccacctaaaacattgagagagggagtgatacaaccccaaaagaagaaggttgtagggctctttccagattaagggggaatggatgcagggggagggggacaaaaacaactgtgcactatacccagaaattgtttaactgtttcctttttttctctaactttttgaggtacaccatacattcagtaatgtgcaccaattttagacttcagtttgatgaatcctcacttacatgtatacattggggcagtcaccctccagatcaagatacagaacattgccaggtccctaaaacattccctcatttcccctcctagtcagtatcccccagaagcaaccactattttgacctcgatcattatagattagttttgcttgctcttgagttttataaaaatggaatcatacattttgcacaatattagtttgtggaattcacccatgttactgtatgtctcagaagttcagtttttttttttcagccaggcgcagtggctcatgcctgtaatcccagctctttgggaggccgaggcgggcgcatcacttgaggtcaggagttccagaccagcctagccaacatggtgaaaccctgtctctactaaaaatacaaaaattagctggtcgtggtggtggatgcctgtaatctcagctgctcgctgaggcaggagaatcgcttgaacctgggaggcggaggttgcaagtgagctgagatcgcgccactgcactccagcctaggtgacgtagtaagactctgtctcaaaaaaaaaaaaaacaagttgagttttttcgtgctgtgtagtggtcctttatttgaatatagcacaatttagccatcctacttttttgtttttgtttttgagatgttctcactctggcccccaggctggaatgcagtggtgccatcaagactcactgcagcctcgacctcctgggctcaagtgatcctcccacctcagcctcccaagtagctgagactacaggcacatgccaccacaccagctaattttttctattttttgtagagatggagtctctgttgcccaggctggtctcgaactcctgggctcaagtgatcctcccgcctcagcctcccaagtagctgggactacaggcacatgccaccatgccagctagtttttcgtattttttgtagggatggcgtctcaccctgttgcccaggctggtctcaaactcctgggctcaagcgatccacccaccttagcctcccaaagtgctgggattacaagcgtgagccaccaagcctggcccagccatcctgttgagggacaactgggttgtttctagtttgggggtatcataaataaaactgctgtgaaggattttttacatgctgcttggtacacatgttcactcatctactcaggcgtggaatcatagagtaggcatatgtttagcttgtctagacactgccaaacagttttccaaagtggctctattgacttacatcctcaccagcagtgtgtgggagctccagcagctccacgtcttggttagcacttggtgttgtcagtttttttaatattggccattctggtggtacccaggaatttgaatccatagttcctgacttgaaatcagggcccttcttacttttagcatgctcaagacaggtttgaattttgtagcctcgaatggcctcagaaatcaatacccaggacccacaatacagcaggcaagcatatgagggagcccctgctcatggctccagtgcctagggagggtctcagagaggcatcagctctggagaggcagtctagcgtagtggcgaaaactcaggttctgggaagcaagcagctaaggttcagatcccagctctgccatcgcaaagctgcctcggggtggaacattagtacctacctcacagggtgatcatgagaattaaaagaataggtggatatgaaataatagtgccttacacatgataaatgctatataaatgatagctgctgctctttctattgttgacctgaagtaagccctgagtccccctggagcgggggtaaggccacaagcagatggcatctggcatagccccatgtaataagattcagtaatccggtctgactgaggcggggggaaaagtagcatagtggctagaagtgattctttactggggcccagcgaaaagtcaccctccactactggggagcccctgcttatcccaggcccaaggctctttggccagtgacactactgaggtgtcacacctgaggggaagaaatggaatcatgcatgaaatggaaccaagaggaagtggaagcatactcttagcccagagctagatgcaaagcagctgtttgaatataacaacccaccagtgcagacacagatctagacatgtacctgtatagcagccaatgaggggtggcatgagggacaagggcctgggattcaggagccctaagtgttggtctgagcactgccaccagctatatgtgacctgaggccttgtgaagtggaagttagaagaaatcacagttcccagctcaaatcctgaagaagtagcaatgaacaggtagagtttcctcccagagccctaagccaggtgtggtgcacgtgcctgcaatcccatctgctcgggaggctgaggcaggaggatcgcttgagcccaggagttcaaatccagcctgggcaacataatgggagcctcttaaaaaaaaaaaaaagaaagaaagaaaaaaggggccaggcgccaggcgcggtggctcacgcctgtaatcccagcactttgggaggctgaggtgggcggatcacaaggttaggagatcgagaccatcctggctaacacggtgaaaccccatctctactaaaaatacaaaaaattagctggtcgtagtggcgggtgcctgtagtcccagctaccgggaggctgaggcaggagaatggcatgaacccgggaggcggagcttgcagtgagctgagatcgtgccactgcactccagcctgggcgacagagcgagactctgtctcaaaaaaaaaaaaaaagaagaagaagaaagcccttccttccctcacagcagtccctgccagatgagctgtccccacccccaaaccagatgctctgatgagcagtcactagtgtaaaatacaataggaagaacactttctccctctgaccatccatccacctaacctcacctctctgccctgtgcaaagccctgttatagagacagggcagacccgtccccggcctgtctctcccaagcttactgttcatatatgctgcttcatctgtctaggaatatcagaacgcagttctgtaaatgttcaactcttcagtgcaatgaccccattagccactaggtggagtcagcttcttttttctagcaaggtagaccagccctgggactttactgtttgatttaatgggaagagaacagggtgacttcacgagcccctgtatatgctatttcagttaaccctcaggacaactggcaaagacttgatttcacaggagaaagtcagggacaaagtcttgcagagcttacacaaccaagaagtagccttggagagagatttgatcttagcacttctgctcattcccaaggccgatttccccttccctcaggacatttccctcaggaggccctctctgtttgagggctgtaacttagtcacctgtctagaagtacacctgatgtcaggccagctccacagcccttcttttccttttctcctttgggtgacaaacctgctccattctcagatcctgtggttccgagggactggccctgctctctgattccaggagtgagcctgtgacccgactgagtaatcacagtcatagtcttcagctgttagtgtccagcatgtaaggacagcctgcttcagaactaagccaacacagaggaggccgggctcggtggctcacacctgtaaccccagtactttgggaggccaaagcaggcagattacttgaagtcaggagttcaaggccagctggccaacatgatgaaaccctgtctctactaaaaatacaaaaattagtcaggcgtggtggcgcacgtctgtagtcccagctactcaggaggctgaggcaggagtattgcttgaacccgtgaggcggaggttgcagtgagccgagatcacaccactgtactccagataaggagagactcatttctgatgactacctggatccagctatgcctgaagctaatatcccccaggactttttagttatgacttttctttaagtcagttgagtttctataacttgcaaccaagatttctgcctaatacttgctccagctccccttgtcaacctggggacctccactcatccagagatcactggcccccaaggccaagttggctgccctttgtgttcccagatgccctgtgttcccctctagcatagcccttaatatgctgtgttacgatgatctaattccctgtctcttcttttagactagaaactgcttgagggcaggaattgggtcttatgatactgcatccctggtccctagcataggactgtgcttatgttttaataactgcttggtgattgaatacattaatgaataaatgaataaaaatgggtatggtctggtagggaccattgctgggatttcacaggaaagacatttattttgtttgttttttgaaacagcgtctcactctgtcacacaggctggaatgcagtggtgcaaacacagctcattgcagcctcgacctcactgactcaagtgatcctcccacctcagcctcccgagtagctgggactacaggcgcacaccaccacacccagctaattatcttattttttgtagacacaaggtcccactgtgttgcccaggctggtcttgaactcctgagctcaaacgatcctcccacctcggcctaccagagtgctgggattgcagacgtgagccaccgcacctggccggaaagacttattgagggagatgatcctctagtggtcatgaaggtcaaaggagccaggttgctggggtgggaggaggcttagtgaaaggaactagaagaggcgagttgtggaacacagttgattgtttcaataatggcctcccatgaatcattgcctccctgtgcctgtgtccttttgcaatgtgactttatcattgctcccatcaagatcgggcgggcgggggagggggggggtccatttcccagtctcttgaatctgaactagtcttgtgagttgctttgatcagagaattcagtaacatgactgtacgacttccaaggttaggacttaagtgctcatgcagcttccgttcctgaccctgtgaaaggaagtttgggctagaccatgtggcgaccacagaccaggtagagagagaagccaacagccagctccatacatgtgagggaggacatcccagaccctctagcatagccaatccacagcataagcagaactgccacctgagcccagctaatcacagaattgtgagaaataatacattgttttaaataattaagtttgggaacagtttgtgcagtaaaggctcacagaatcactaggtataataatcagaagcttcctagtgtctgtttacccttcttcctataataagcttttctttgaaaaaccccaccctcagcttatgtagtccgggtggggaagacctccactctcctggcttttgccagaacagttgagaagttgccaagtgggaatgtctcgagcccagagctgttagtggccttctttgtcacttcttagggagcacctgtcatagagaagaagacagaagagagaatgagttttgaccatactgttgggaaccaggatcaagctgtttctggagcctgattcacaccaggacttacagtcatgctcctgtagtcccagctactcaggagactaaggcaggagaatttcttaggcccaggagttcacatccagcctgggcagcacaacagacctcatctctttaaaaagtgcatgagccagtacattcactattttgtgtaagcaggtttgaatttgagtttctgtgtcttgcaactgaatgaaaacgttcgctgagagccagaaaaattgatagaggctgagcagctccagggcagagggcagttaggtcagacagaggagggattcctggccgggcaagttggctcacacctgtaatcccagcactttgggaggccgaggcgggcggatcacgaggtcaggagaacgagaccatcctggctaacacggtgaaacccgtctctactaaaaatacaaaaatttagccgggcatggtggtgggcatctgtagtcccagctactcgggaggctgaggcaggtgaatggcatgaacccaggaggcgaagcttgcagtgagccgagatcgcgccagtgcactccaacctgggcgacagagcaagactccctccgtctcaaaaaaaaaagaattttttttaaataaaaataaaatatatctacattttggccgggcatggtggctcacgcctgtaatcccagcattttgggaggccaaagcaggtggatcatgagatcaggagttcaagaccagcctggacaacatggtgaaaccccgtctctattaaaaatacaaaaaaaaactagccgggcatggtggtgggtgcctgtaatcccagctactcatgaggctgaggcgggaaaatggcttgatcccaggaggcagaggttgcagtgagccgagatgagtaacactgtaccccggcctgggcgacagagccagacaccgtctcaaaaaacaaacaaacaaaaaaatctacactttttaatactcctcccttcaataggtcaagtttaatttctaccctatatcccctaatatgggctgtaagtagcaattcactttacttactgattgattgattgactcaaggtcttgctgtgtcccccaggctggagtgcatggcacaatcataggtcactgcagcctcgatctcctgggctcaaacagtcctcccacctcagcctcctgagtagctggaactacaggcatgcgccactgtgcctggctaatttttttttcctttttttttgagacagagtttctctcttgtcgcccaggctagagtgcagtggtgcaatctcggctcactgcaaactctgcctcctgggttcaaacgattctcctgtctcagcctcccaattagctgggattacaggcacccgccaccacgcccagctaatttttgtacttttaatagatacagggtttcaccaggttgaccaggctgatctcgaactcccaacctcaggcgattgacctgcctcagcctcccaaagtgctgggattacaggcgtgagccaccacgcccgtctggctaatattttttattagggtctcactccgttgcccaggctggtctcaaactcctaggctcaaggaatcctcctcgctcagcctcctgaagtgctgggattataggcgtgagccactgtgcctggctgtgactcacttttaactaatagaataagacagaagtgacaagaatctgatgtctgagagtaagttatacattacattgcagcttcaatatttctctcttggatcaccagctctgagggaaaccagctaacgtgttgtgggaacactcaagcagccctatcaagaggctgttgttgagagaaatgtaggtcttctaccaatgacaaagattctttggttggccaaattttagtcaggcttctgagccttctcctaggtccatctgtgcacttccttgtaaaatctagttttagcaaagaacctgctaagtctagtttagcaagaactgccgcccatcttcgatatctgatcaggttcctcctcctccaccatcccccaggtgatggctgatgggcctgtcttcagcaagaatcctgttgggtcagtttggacagaacccctttaccccaacgtttcctcttagtcattttccattcactgctccccactctgttccttggctcagaattcccactcgcccatgctgtattcagaatggagcccaatctctctccccctctgcaagatcccattgcagtggtccctgtgactatctcaatggtcctgaataaagttttctttactgtgctttaataagtatcgttgagccgggcgtggtggctcacgcctgtaatcccagcagtttgggaggctgaggtgggtggatcatttgaggtcaggagtttgagaccatcctggccaatatggtgaaaccccgtctctactaaaaatacaaaaattagctgggcatggtgacaggtgcctgtaatcccagctacttgggaggct

SEQ ID NO: 3226 - DNA, 3074 bp, Homo sapiens
aggctctctaccggtgagggtttgcggggaagatggagtatcccgcgccggccacggtgcaggccgcggacggcggagcggccgggccttacagcagctcggagttgctggagggccaggagccggacggggtgcgctttgaccgcgagagggcgcgccgcctgtgggaagccgtgtccggtgcccagccggtgggtagagaggaagtggagcacatgatccagaagaaccaatgtctcttcaccaacacccagtgtaaggtttgctgcgccttgcttatttctgagtcccagaagctggcacattaccagagcaaaaaacatgccaacaaagtgaagagatacctagcaatccatggaatggagacattaaagggggaaacgaagaagctagactcagatcagaagagcagcagaagcaaagacaagaaccagtgctgccccatctgtaacatgaccttttcctcccctgtcgtggcccagtcgcactacctggggaagacccacgcaaagaacttaaagctgaagcagcagtccactaaggtggaagctggaaagggctacccctgcaaaacatgtaagatagtgctgaactccatagaacagtaccaagctcatgtcagcggcttcaaacacaagaaccagtcaccaaaaacagtggcatcatccctgggccagattccaatgcaaaggcaacccattcagaaagactcaaccaccttggaagactagaggtgattctgcccagcatcccatattgggccagccatgagccagcttcccgtgactgctcagcccttggctccctcttgctcgttgttctcaccaggaaagtacacgggcctgaggcaggattgggccacagacagcctctcattggtccgggctaattcactcctgctgctcccctttggcaggggtcctgtaggtcatgacaggggaggcaagggtattgagagactcggggtctcgcggggtggtagtttggagggtggctttccccatttcccaacccctctgggccttaggtgctgaggcccctgccacctgtctttcctctaaaggtcagttttgggccagttcttgcaactaaagagcagagatctctctgggccctagacatttccagcaaaacctggaactttcatgccaaacctggggcagggcaggaaacagaggaaatggctgcaacatgggagcttggagctaatacgacactctgccttcccccagaaggtgcaggctttcctgagtcttagaccagatatggccagttgcgcaggtttctgccaactgtgaagtatcctcctggagcagtgacacaatcttggcggagcattgctacccccgctgccccctccacagttcctgaatggtgctaaggatctgcagcagttggcaacgagctggggctgggggcggcctccatgtccactgagatcataggacactccaatggggatgggacctttcccctcctccatcagaggtgctctgaccctaggttacacgggaaagtgccccacatgcaagtctccctgagggttctgcccctaaaggcagactgcctcatgcccgctagctgtgaggttcattgctaccctcggccctactagccctctcttcccccttgtgcagcggaccacttgcccagtttgctgtggtgctagccttccccatcatccaccaggtgatttctgggtcccagggaaagaaagagagagctgatgcaggtttctacagtgaggaacaggcgtttcccaggccccacacccagatttctctatctttgctgtgttttatggcctgggactgagtccacacggatagatttttccttgtaaccttgagacgagaattccaaggagtgtcaccatcagaggcttctcttcattgtgtcaaagaagcccctagctgctctcgtggcctccttcccccactccctatcccttcacctgtgaaatgcctttgctttgcatattgtgtgtggatgtgtgtgtgtgtgtgtgtgtgtgttgtgtgtatgtgtgtgcttctgtgtgtgcctaatgctctgtctcttggtcactgaagcatccaaataaagaatttccctcatgggccagactacaacttaacagacctagggttttgagccatattgccattggatctagtatgtctgtcttgacccctcacccccaccccattcagacctcagtagtccccagtagtcactttaggagttgggacagagtcgagcaccctgtgaaagtctcccttgagttcaggtgccctgaactcagtacagcctcatcttctcatccaccaccttctcctgcttctcctgtcacatagggcctcatgaaggtctttaaagggtttaagctggggatctgctttatgtttgagagaactgttctggctgttatgtaaaggagtgcagggaggggcaggaaaggagacaaggaggccagtatggacactgtgtccagtatggctttccaggctaatcacttagggcagagacccagccttattcatctctacttcctgatgtccatagtggtgtgtcatgaatttttattgaatgaacaaatgaggtgtatgaggagagatggttttctcctgctcagctcttacacagtgataggtttgttccatgggacttatcataggcctggtgattcttgaaagagcatttttcatgactcaaaaatgagctgagaaggagtgttatggccaggtgcggcgtcatgcacctatagtcccagctgctcaggaggctaaggcagaaagaccattcaagcccaggagttccagcctgaagtatgctgtgatcatgcctgtgaataaccactgcactccagccagggcaacataacaagactctatctaaaaaaaaaaaaaaattataaaaataaatttgaaggctgggcgccgtggctcacgcctgtaatccaagcactttgagaggccaaggcaggtggataacctgaggtcagaagttcgagaccagcctggccaacatgatggcaaaaccccgtccctataaaaaatacgaaaatcagctgcgcctggtggcacacatctgta

SEQ ID NO: 3227 - protein, 230 aa, Homo sapiens
MEYPAPATVQAADGGAAGPYSSSELLEGQEPDGVRFDRERARRLWEAVSGAQPVGREEVEHMIQKNQCLFTNTQCKVCCALLISESQKLAHYQSKKHANKVKRYLAIHGMLKGETKKLDSDQKSSRSKDKNQCCPICNMTFSSPVVAQSHYLGKTHAKNLKLKQQSTKVEAGKGYPCKTCKIVLNSIEQYQAHVSGFKHKNQSPKTVASSLGQIPMQRQPIQKDSTTLED

SEQ ID NO: 3228 - DNA, 3260 bp, Homo sapiens
aggctctctaccggtgagggtttgcggggaagatggagtatcccgcgccggccacggtgcaggccgcggacggcggagcggccgggccttacagcagctcggagttgctggagggccaggagccggacggggtgcgctttgaccgcgagagggcgcgccgcctgtgggaagccgtgtccggtgcccagccggtgggtagagaggaagtggagcacatgatccagaagaaccaatgtctcttcaccaacacccagtgtaaggtttgctgcgccttgcttatttctgagtcccagaagctggcacattaccagagcaaaaaacatgccaacaaagtgaagagatacctagcaatccatggaatggagacattaaagggggaaacgaagaagctagactcagatcagaagagcagcagaagcaaagacaagaaccagtgctgccccatctgtaacatgaccttttcctcccctgtcgtggcccagtcgcactacctggggaagacccacgcaaagaacttaaagctgaagcagcagtccactaaggtggaagccttgcaccagaatagagagatgatagacccagacaagttctgcagcctctgccatgcaactttcaacgaccctgtcatggctcaacaacattatgtgggcaagaaacacagaaaacaggagaccaagctcaaactaatggcacgctatgggcggctggcggaccctgctgtcactgactttccagctggaaagggctacccctgcaaaacatgtaagatagtgctgaactccatagaacagtaccaagctcatgtcagcggcttcaaacacaagaaccagtcaccaaaaacagtggcatcatccctgggccagattccaatgcaaaggcaacccattcagaaagactcaaccaccttggaagactagaggtgattctgcccagcatcccatattgggccagccatgagccagcttcccgtgactgctcagcccttggctccctcttgctcgttgttctcaccaggaaagtacacgggcctgaggcaggattgggccacagacagcctctcattggtccgggctaattcactcctgctgctcccctttggcaggggtcctgtaggtcatgacaggggaggcaagggtattgagagactcggggtctcgcggggtggtagtttggagggtggctttccccatttcccaacccctctgggccttaggtgctgaggcccctgccacctgtctttcctctaaaggtcagttttgggccagttcttgcaactaaagagcagagatctctctgggccctagacatttccagcaaaacctggaactttcatgccaaacctggggcagggcaggaaacagaggaaatggctgcaacatgggagcttggagctaatacgacactctgccttcccccagaaggtgcaggctttcctgagtcttagaccagatatggccagttgcgcaggtttctgccaactgtgaagtatcctcctggagcagtgacacaatcttggcggagcattgctacccccgctgccccctccacagttcctgaatggtgctaaggatctgcagcagttggcaacgagctggggctgggggcggcctccatgtccactgagatcataggacactccaatggggatgggacctttcccctcctccatcagaggtgctctgaccctaggttacacgggaaagtgccccacatgcaagtctccctgagggttctgcccctaaaggcagactgcctcatgcccgctagctgtgaggttcattgctaccctcggccctactagccctctcttcccccttgtgcagcggaccacttgcccagtttgctgtggtgctagccttccccatcatccaccaggtgatttctgggtcccagggaaagaaagagagagctgatgcaggtttctacagtgaggaacaggcgtttcccaggccccacacccagatttctctatctttgctgtgttttatggcctgggactgagtccacacggatagatttttccttgtaaccttgagacgagaattccaaggagtgtcaccatcagaggcttctcttcattgtgtcaaagaagcccctagctgctctcgtggcctccttcccccactccctatcccttcacctgtgaaatgcctttgctttgcatattgtgtgtggatgtgtgtgtgtgtgtgtgtgtgtgttgtgtgtatgtgtgtgcttctgtgtgtgcctaatgctctgtctcttggtcactgaagcatccaaataaagaatttccctcatgggccagactacaacttaacagacctagggttttgagccatattgccattggatctagtatgtctgtcttgacccctcacccccaccccattcagacctcagtagtccccagtagtcactttaggagttgggacagagtcgagcaccctgtgaaagtctcccttgagttcaggtgccctgaactcagtacagcctcatcttctcatccaccaccttctcctgcttctcctgtcacatagggcctcatgaaggtctttaaagggtttaagctggggatctgctttatgtttgagagaactgttctggctgttatgtaaaggagtgcagggaggggcaggaaaggagacaaggaggccagtatggacactgtgtccagtatggctttccaggctaatcacttagggcagagacccagccttattcatctctacttcctgatgtccatagtggtgtgtcatgaatttttattgaatgaacaaatgaggtgtatgaggagagatggttttctcctgctcagctcttacacagtgataggtttgttccatgggacttatcataggcctggtgattcttgaaagagcatttttcatgactcaaaaatgagctgagaaggagtgttatggccaggtgcggcgtcatgcacctatagtcccagctgctcaggaggctaaggcagaaagaccattcaagcccaggagttccagcctgaagtatgctgtgatcatgcctgtgaataaccactgcactccagccagggcaacataacaagactctatctaaaaaaaaaaaaaaattataaaaataaatttgaaggctgggcgccgtggctcacgcctgtaatccaagcactttgagaggccaaggcaggtggataacctgaggtcagaagttcgagaccagcctggccaacatgatggcaaaaccccgtccctataaaaaatacgaaaatcagctgcgcctggtggcacacatctgta

SEQ ID NO: 3229 - protein, 292 aa, Homo sapiens
MEYPAPATVQAADGGAAGPYSSSELLEGQEPDGVRFDRERARRLWEAVSGAQPVGREEVEHMIQKNQCLFTNTQCKVCCALLISESQKLAHYQSKKHANKVKRYLAIHGMLKGETKKLDSDQKSSRSKDKNQCCPICNMTFSSPVVAQSHYLGKTHAKNLKLKQQSTKVEALHQNREMIDPDKFCSLCHATFNDPVMAQQHYVGKKHRKQETKLKLMARYGRLADPAVTDFPAGKGYPCKTCKIVLNSIEQYQAHVSGFKHKNQSPKTVASSLGQIPMQRQPIQKDSTTLED

SEQ ID NO: 3230 - DNA, 81598 bp, Mus musculus
  misc_difference (1)...(81598): n = A, C, G, or T/U
ccagtggctgctgagattgtagtttctgtctggtgagctcctccggaggcaaggctggctccagcgggttagccaccggattttagagttttagctggagcaacaacttccccaagagcccgatttcccagaggaaaccgcgccgctcaggcaggcagttaggattggttgggtctcggcaaattgggtgcttcatttggcactgccctgggacattctgatatctgcggaaagatctctcgtgtctctcctgtttccctgcaggttgtgggctgagaagcctaggctcgatggacacggagcttggtggtttagggtaacatgtctctccgttgtggaaagcagttagattagaattagctctcgttccaacacggcacttactggttacttctctatgctttttgttcattttctcgtcgttttgctgagttccagcactggaatgtcatagttaaaaatatgctgctctcaatgtttatttattgaaagataaaggctataacaatttcaaaaccctgtaaatgggattgattacaggtatgtgttggatattgtaatgggattatacgccgggctgtaacatacagaataaaagattcatggctgtttttcttgccagtgtaatgtttcggttttaatttttctgtttgtgcgctgaagaaagtctttgcaatcaaccaccaaaggctactgctaagaacctgttccgtagcctaggtttttgtttgtttgttttggtttttggtttgttttgtttttcaagaccgggtttctctgtatagccctggctgtccttggaactcactttgtagaccaggctggcctcgaactcagaaatctgcctgcctctgcctcccaagtgctgggattaaaggcgtgtgccaccaccgcccggctttttttttttttttttttttctcgtagcctaggttttagtccttcctttctttgctgtaattcgagcacagggaaagttctaaaatatcctaatataatcttttatttatagtcgactattatggggttcccaccaaggagcacttgaacactgcctatgagccaatggaaagcctttcttccagccgcaggtgactacagctgggtattccggacccaagttcattcatctctgagcctggaaagccctcaaggttcccatcccgcagttgcaagctaactacagttacaaaagccaaaatacgcgattagcaaaaaaaaaaaaaaaaaaaaaaaaaaaaaaaaaaattatggcgttgtnnnnnnnnnnnnnnnnnnnnttccttcgtggaatctgaacatgacatcaccactgcttttacaaatagcttatttttaaaagggggaggtgtgcagtctcacacacctagcaataccccagactcctggtctacctcccagggacatggcgccagccttctcttccctatggcagcagcactgcgcatgctagacttcacactcggccccaaagctgatgttgagaccatgctgaaaggccttcagttcatttttcagatgcaaggtcactgcacacctatcaggaccacaacaattacaacctaggctaggtacacgaaaatggcagctttggtaatttgagaatttttctgcatggacattcctggactgtcagcattacgacagtgatgaacaggacaaacaagaatctgactactttttgaacaaaacagaagaaaaaactaaaagaaatgaatcaggacagtgtaggggttagttctaatgctcaggttctccaactggctcttgatccatcaataaagataccagcgcccgatgactgagaatggggagggacacttagagttgagtgggaggacgaaggcagaatggagagagctggggaagaagaaggaggagctgtaggagataatgccaaccagccatgtgagttttcctttttgagtggctaatggacactctgtccgattatacctggagtggcagaagaggtttagcagtgctcagtcattgagttagcaaaggcgttttaaggttaactggtgcgtgtgggggtggggttgtttgtttgtttgttttggttttggtttttcgagacagggtttctccgtatagtcctggctgtcctggaactcactttgtagaccaggctggccttgaactcacaaatctgcctgctctgcctcctgagtgctgggatcaaaggcgtgcaccaccaccgcccagcacgtcagcatgtgtgtgtgtgtgtgtgtgtgtgtgtgtgtgtgtgtttaaatttgtagattcaagggaagctgggtgggggctggtatcgcagccagttccagagcttaggcagggtagcaaaagctacacacgacaggacagtacttggcaggtgaagcctatacaacccatagttcaaggtgagccctagacaggttttgaagtggtgtacaatgaagatttggtatatcaaaacattaaaatctgcactcgaagcattatttgctatagcttaggccttagttggccaccttgcagctagctcttctaacttaattaacccagtgattcaagtctacatttgctacatgactctccctttacccattacgcagtcctggtatgtacgacctcctccatgtgttgatggagaattgctgcctctcgattcttcccacagttcctatctctgcccaacattcctgttctcctcagctactggcagtcagctctttattaaacggatcagaagtgatggacaagagcttacagagacagctgatgatccctaaaagtaacactaccaaagtcagacagtactaaactctctgctggtatggaaaccaacacttgaataatgcaaagacagcctttcaactgtgaaccaaaggattatcccaacaatgttttaatgtttaaaaagccaatgagatctgtatatttttatgagctactatggtgttgtttctgaaagtcagctggaagcagaggaaacggtgaaatgcactgcccaaatagaacatgatttttttttttttaaaatgctttttatctcggtgggatctttggagagagttagctttggtttcaggagacatttaatttggatgtttggaataataaactattcattctgaaaagagatttttgaaaatgttatcccttttccctcccaatattgacttaaatgtttaaatgtagaggttataagaaagctaaaattaaaaaaaaaattagggagtgggggtgggtgggtatgggggacttttggtatagcattggaaatgtaaatgagctaaatacctaataaaaaatggaaaaaaaaagatagttaaaaaaattaattaacactgcttcacttaaaattatgaaagaagaaaaaaagtattcaagggatggtttagcaggtcaaaacactagctggaacctagttttgaaactcctcctctcatttacacacacacacacacacacacaaaggcacttacctcacatccctggccctggccaacacacacacacacacacacacacacacacacatttgcttttgaggagtgggaaggttgggagtgacaagcacactaacaacccatttgcagtccaggtagcatttaagtacatcattacccttattaactcctctgaacaattttgtgagacagatatataaagcatgtagttttagcagctccactttaagctccaggaggaccatgccaccagcaccccgcccccccccccaggtctcctcggctcattttgataaaacaatttaaagcaattaaagcaatctaaataaacaataacggacgagagggtgtttctcttgtctcttatcttgaccttcatgagatcaaggcctggatttctattgtgtgaggtagggtaggctccctttcctctgattttcaacctatttttttaacttattttttttttagatttatttatttattatatataagtacactgtagctgtcttcagacactccagaagagggcatcagatctcatgacagatggttgtgaatcatgatgtggttgctgagatttgaacttatgacctttggaagagcactcagtgttcttaactgctgagccatctctccagccctcaacctaattttaaaaagtcgaaagcctcaactctttattatctatgtctacttattgtataagcctatttctaggctctagtaataccaggcaaagatatcccaccaatagaccatgttcagagatttttgagtatatcccttggcaagaccattttcaatcttctctaaaggattttttttttcatctaatctctaacttctcccttttgtggagtttaatatctctgtatacttgagaacatttagacaattatcattttatttccttttatccttaaaaacaattcaattaaactttatgtatctctattttttagattatttgcttgtaggaagtaggctgattcgttgtctcagggcagtcatcttgtctctttgtacaacaggggctctcagcgtctcagctaaggctctctgaggctgctaggatccttttaaaagggctctgggtaaatccttggctggtggctgtgttcatttgttctagttttgcactctggagccacgacatggctctgctcagctgagaaaccagttctcccccctattacactatattattgtgtatgtgtaatccatccaagagtttttcaattaatagtggattctcgctccaaattagatgctatagtgtgcagtttttgctacactgctttaagctgcaggtggactgagctaccagctccgcccaggttccctcggatccacagatcacacacacacacacacacacacacacacacacacacacacacacacaggaggccaattattgttattgttgggttttttttttttttgtttgtttgttttttgttttttgtttccaatggccaggctcctctaagccttccctggctattgcacccttcttttcactcccaggtcagcacactaaatctgtctttaattttagctgctcagtcacctttagtcccagctcagcaccccaaatttgccctcatcttagttatgtttctaacctctcatcttgtcttctaccctaggcccagtcagagaagcggcaaatagtctagatctcacaaggctgatggctttttttcccctctggtaaaagacggtaaatctttttctggacaggggcgggaccggaagtcccgcctattccacccagctcattggctactaatatctttattgattgatcaggagccaattgtagagcaggtccttttaatgttcacatgtaaattccgatcaaggcatcagaaccacagacatgtgtctgttgtataggtgagaaaggtcaagggcaaaaatatattgtatcttacttgtgatagtgcaataaatgacaactgttgcttgaaatgaggactggtttttgtaggcttggagccttaaaagtatagtgctgggctggagagatggctcagaggttaagagcactggctgttcttttagaggtcctgagttcaattcccagcaactacatggtggctcataaccatcttataatgatatctggtgccctcttctggcctataagcatacgtgcaggcagaatgctgtattcataataaatctaattttaaaaaagttttaattacattttaagtaattaaaagtaataaaaggggtggccatgtggtacagtgctgtctagcatgtgtgaggccttgactttgatctccagcaccacatagtgttactactgtaaatgtttcccacctgttaagtcgtcttgtatcaacttaagctgagactgaccatactaaaggtaacaagagaatagaagagaaattgtctttcttcccaatactgatgcctgcattaagatgctgaaactgttgagaaatttcaatagaaataaaagtgaacaaagagtacaccagcacaggggaaacctgtttttttggtttttgtttttgagacaagtcttactacatagctctagctagcctcaaactcacagaagtccacttgcttctgtctcttgagtgctaggattaaaggcatacactaccatgatgaacaggattgatcaatttgtgtgtgtgtgtgtgtgtgtgtgtgtgtgtgcatgcacacatttgtacatgcacgcacctgccatgtttgtgtgatgcccacagaggccagaagatggcaactgatcgcccagagatggaatcaacaggttgttaacaagccacagatgctggaatcggaaagagcaacaaagacttaactgttgagccatctctcctgcttgaaaaattgttcttgcaactgggatcatttcagtgtctctgtgggtacctactatatttttatacttatttttatattattttccagtgtagaaacaattgtatttattatatttaaaagctatttgaggaataagcatctcataaactatttggttacttgtgttagtcagatgtttatcactgtgacacatacctaagaaaaacaagggaaagtgattttattttgtttcatggtctcagaaagtttgatccagggacagctggctttatttatgagtctggtaggaaggcatattgaggaaggtcatgagagaggatagctatttaccacatggcatccaggaagcaaaaaagactagtagggagtggccaggtactagaggcactcttcaaatgcacacccctaggaatctcctttctctaactggacccccatgttccataggtataacattcaaatttttaaccagtcaatagataaaagccctcacgatcaacaccctcgaagacatatccagaagtatgctgtactaatcctggagatgttccttaatcaactcagcttaagcatcatgataattccagtaaaacctagaacatgaaaactactctgcagaactaatggtctttgtagtgctaagaatcaaatacagtgctttgtgcataataggcaaggactctaccactgagctttgttgagagattatttatgtgtgtgtgtgtgtgtgtgtgtgtgtgtgtgtgtgtgtatatatatatatatacatatacatacatacataacacacacatatgtacacacatcttttaaattcttattctttttaaagttagcttgtgggctggagagattagattgctcagtggttaagagcacggactgcttctccaaaggtcctgagttcaattcccagcaaccacatggtggctcacaaccacctataatgggatctgacacccttttctggtgtgtgtctgaagacagtgacagtgtactcatataattaaaaataaataagtttaaagaaaaaaagtttgcttgtttgtttactttttgggacggggtttcattttgtagtccgggggacctggaattcaccaaacccattctcaagtttgtagtggtcctcctgcttcagcctcctgagttctgggattgttgagctgagttttaaagtttatgtatttttatttttgtttctcttagctaggactcacgtagctcaggctgcccccagactattatgtggctgagtctgtccttaacctcctgatccttgagtgtccaaaacccgtgtgctgggaatacagatgttctgggattacagatgtgcagtaatgtgtctgctctttccctccaagacacaaagatctcagtgtatagacaaagttgtcctggaccttattatgtaagccaggttgtcttaaagctcacagtcttcttgcctttgcctcctgagttctgagattacagagatgggccactgtatctgactgatgttataaaaaaagtaagtgtgtgtgtgtgtgtgacagagagagggggtaagggaagccaatgtttctttaattaaataacaacttaataattattttatgtatgtgagtgttttccttgaatgtatgtctgtgcactaggagcttgctggtaccctcacagatcagaaggctacattggatcccttggaactggggttatagatggtgtgaactaccatatggatgctgggaattgaacccagaacctctccatgctctcttaatctctgagctatcgctacagccccctcaatgtttctttccttccttccttccttccttccttccttccttcctttctttttttccgagacagggatttctctgagtagccctggctgtcctggaactcactcagtagaccaggctggccttgaactcataaatccgcctgcctttgcctcctgagtgctgggattaaaggtgtgcgccaccacgcccagctctcaatgtttctttaatttagcatttcatcaccaattttctgctttctctttgtagttctcaattgtatgcaaaaagcactatgttttcaaatacacactgcggaaatagtttagtggttacagtgcttgcctggcatgttcaaggccatgtgttctactcttagcaacccaccctcccccacccccaaaaagaaaaagatttcaaatataacctgaagacactcaatgataagttaattctaatattttccctattctctcaaaattgagcatgaaaatatagtaatgaagtacagtggattgagggttattcatctagctgtaaatatttgttttgtcaacaatatgcacctgcatcttccattcaatactagtcaaaattagtacttctgaatacatcctaatttggggtcctagtattctagacacactttgtgtatgcttttgctgttgttggtgtggttttttttttttttttttttttttttttttgaggcagggtttctctgtgtagtcctggctgtcctggaactcactctatagaccaggctggccttgaactcagaaattcgcctgcctctgcctcccaagtgctgggattaaaggcatgtgccaccatgcccggcctgcgtatgctcattttttaaaattaaacatttcctaagatttacaaaagacctatgactccaataaaagagttctatttttcaaaatttctctttttaataactacttaattctttcttcccacactaactatcgcttgtctctctaccattggacacatcctctgggtggttggcaacattagcatcaacgggaatgtggatacattttagaccaaccatgtagctgtgagtttgtgctacaccactttgtgctcccagaggatcacgcacttccacccactctccaggaactctttggattctggaatgaaagccacacacacattagcttatttttgaaatgcctttggttaactcaatgactgggcactcctaaaccttcccaacagagactatatgcatgtaaccctaacacttgagaagtggcggcgtcggaatttgaaggtcatcctcagcgatgccagcctggggtcctgagaccctgattaaacagcagaactctagcggggcgtggtggcacacacctttaatcccagcactcgggaggcagaggcaggcggatttctgagttcgaggtcagcctgggctacaaagtgagttccaggacagccagggctatacagagaaaccctgtctcgaaaaaacaagaacaaaaaacaaaacaaaaaccagcagaactctaacccccaccccccaaaaaaaaaaaaaaaaaccaaaaccaacaatgctcatccaaatacctatggtggcagagttcatcaatgggattcttttgatgaccctcttctgccgtgacagactcctaaaccaagtagctgacagaatagtgaagatgcaatgaatggttttgacttaggcttcgatcagcgcaggagactatcgattttctccggacctacggtttccatagttacaggggcccctaagccggcgccttgctccgggtaccacgcaagcgcacacaaccctattggctgccgcgcgccttcgggttcgaactcgagttcctccctccccttccctccgccgtcctatggcctctctcctcggcctctcccgagcgctctgggaacctgtgacgtaattttagcgcgccctcgtcgtttggagtggcgacgcggaacatggcgcgttcctagaagccgttttcggcatcagtaggcggcagcgtgtggactaggagcgtgggggacgaggaagcaaccaacgccgcttcgtgtggacaagtggaaaggggcgggccgggcggttccggaccgaagcacgcggtgaggcccggccgcgagccgcgcggatggaaggaaggaagggaggagtgggctgggcagcgagagaccccgcgccgagggcggaacgcggggtcccgcggagctgtgcggcgtggccgtgggccctcgcggctctggtgtagcccgggcgagcacgggctcccgggctgtgggaagcctctgggtgctgggtccacggtgcggcgtggcagggtctgagtgacaggctgagcaaaggcgagggtacctattgtgtcccctgtcgccggccagggggctgtatttgtccttggaggctttgggctgcacagcacgagggaaacgtgttccccttcccaagaccggtgtgtggagttagctgcacacgcgaccttgccgtggaagctgtgctttggaaagctttaagcattccgatcgttccttcaccattaaggaaaaagtgaagggacttcaacatcaattctccaagaggagattcatgctgaggtatggccgccagtgcacaggctcagcgactcctgcagctttacatttgggaatatttgtgattcagcaaaattatttcgaggcccatagcatttgctcttttccccttaattctcttattgcgtggtcaacgtgagaatcttacagcagagtgattttttttttttttttttttttgcgtacatagcaaagaccggtaatctggcttctggtgccaaggttgtagttggcacacctcttctccacacgttacaggagctctgttacatgcgataatgcctttaagatatgcttgttgtatagaaggaagcaaggaagagcagttggcaaccatatattttaacctctcgtggactgagatttttctcttccatttccacattatttcagaattttgttctttggttaagggcagaatgacttcattatatgagcttgatagctttctttacatcattacctacatggcttgatagctttccccacatctttgttccacacagaggaaaattttggtagaattagaatttttttttcctgctggtggtaggattgcagacttttttcttcttctttgggtgttctgatggtgtctagcataaacattttaatttattttgtggacgtgtgtaatagctatagggcaggagggcattttttttttgccttgattacacttcttaaagccaaaagagaattctcaaaggaatttggttgtagtaatatggatggaggttccaaagcagtgtgcaacagttatttggtaattaaacaagtctttagattttgtgatattatgaaatgtatttacattcagcaccaagctagaaggcagaatagtacttgtagtatttggatataagatatactgaagatgtttctcaagaatacagatatccatttttaggcaaaggtaatgtttaattatttttgtttttgttttttgttttttttgatttatcttttaaaagctaaatctttgttttttttgttttttgttttttttttggtttttcgagagggtttctctgtatagccctggctgtcctggaactcactctgtagaccaggctggcctggaactcagaaatccgcctgcctctgcctcccgagtgctgggatcaaaggcgtgcgccgccacgcccggcttaaaagatcttcctgtgtcctcttgtctgtgctgttgctgaaacaggcagaagaggggcttggatcttctggtaatggaattacaggttgtgccccacctgacctgtgtgcctgctgggaatcaaacttgggtccttaggatgtgcagcctgtgccaggccatctctccagtcctgattagtttgtgtttgtgtgtgtgttgcatgggcatatgtgtatatttaatctttgttctgatttattatcatcatcattactatctctgagatagactttgactgtgtagctttagtttgtgtggaccaggctggccttaactcagagataccttagtgcatacctcttttccttagtgctgggtgtgtgttgccacattgggcttaatttagaattactgttggtaagttaaatttttaaaaaagagttatttatttttatttatatgagtacactctagctgtcttcagacacacaccagaagagtgcatcggatcccattacggatggttgtgagccaccatgtggttgctgggaattgaactcaggacccctggaagagcagtcagtgctcttaactgctgagccatctctccagccccagtttaaaaatttttatctttattttatttatgcagtgttgggattgaacccagggccttgtacatgttttatcattaagatatttactatttgtgcatcttcagttttgacttttgttttggtttcgtggtgttggaggtagaacccagggatttgcactttacagctgcattagagtcccccagcccccttcctttctttgtgcatgtgatgggtctagtcagctagtttcggggtgctttacacagtggctgatcacatctcttgcaggtgtgcttctggagtgccttttgtttcattttctaaagatgagcctgactaccaagtaagcctacattacaagctttgtagagcctaggttcattagtgttctatatcctttttttctcaaaatgtggcttatcaccagggaatttggtaaaaatacaagcacaactgaaaagttactgaaacagcatctacatatctaggtattttaaaacatgctttatttgcatatattatatacatggtaatagatttcattatggcattgtcatgtatataataatatgttgtgatcgtattcatcccattaccgtcttgtgccccttccgctaatccccttcctgtttcaactagcctctttctatttcatgtgtccctgtctctgtcctatgagattcattacggttgtttacaggaacattggtgaagatttgtttacagttgcatgggtccctcaccaatgactttaccattccttgcctcacttatcagtcattaattgttataaatcctcaggaagggagctcatgagcccctttcctttcctttcctttcctttcctttcctttcctttcctttcctttcctttcctttcctttcctttccatggctgggtgttgatagcctcattcttgtggtctgtggtgtatgcgtgtgtgtgtgtgtgtgtgtgtgtgtgtgtgtgtgtgtgtgtgtgtgtgtgtgtgtgtatgtgtgtatttgcttgcatgaggaagctagaggacaatgtatattgtttccttgaatggggtgtctgacttccatttaagctaggctggctgaatggccaaccaagctctcttatgatctacctggttttgcctcctaccccgtgttgtggtcctagaaatgtgctcccatgctcagcctttaatataggtgtggggatttaaatgcacatcctcatgcttgtagaacagatttacctatgaagtcatcactgtcccttagatttagcagttttgtgcaggtaggcacaggtgctgtaattaaagagtgcaatagttgacattcgacccaccctcagcccagcttcttgtgactcatacattctttttgcctcttccatgatgttctctgagccttggaatcaatgtcatagatgtcacacttatggctgggcattcaacgataatttagtttcagtactttgatcaattagaagtctctgttgtcactactgaccactgcaaaaagcttctctgaccaaagcagacagagggccagtctataaacagtaatgttgaaggcagttttggaaaacaactgcagtggcttccctgctggggcttgtaacctcttcagccatggcacttggctggctttaccagatgtgaattccctgctgtggagtgggcatcaattcaatcagatagatttggtttctctctaacggacttaccactgttgaactagtgggctcctcttgcctctgctgttagactagcacaggactcagttgaataagactgtgaatggcagttcttccccagcactcagaggagcaatttgtagccccacgacgggctagccagcagggagggttagccagtccagttctagcttgatttctctgtatcttgtaagtgagggttatggcatgtttgtttgtttgtgtttagcaatatggtcttagtttgcctgtattgttttgggagactagggatgcactgtattcctagtgatagtgtttttgtttaataacatgcagaatctacagtttaataagatatccaggttataggaatgctcagtaaagtttgtgatgtgctactttggtttatgaaagttggaaaatgagtgtgtctgtgtctgtctgtgtgtctatgtgcatgcgcccgtcatttatttcaatttgacatgtttgtgttttgcttattattaattctgattcatcttgtcaaagaaactggctcagataagattactttataagatcatacacatctattcataactgtgcctctgattcagcctgttgatttcttgtcactgttagctggtcagtgtcaggctttattgtattgaagctgggaatgacagctaggaattcaacagtgacttttttttttttaaagatttattatgtatacagtgttctgcttacgtttatgcctgcaggccagaagagggcaccacatcttattatagatggttatgagctattatgtggttgctgggaattgaactcaggaccatctcttcagcccgatcttttgttttgttttgttttttttgttttgttttttgcttttcgagacagggtttctctgtgtagccctggctgtcctggaactcactctgtagaccaggctggcctccaactcagaaatctgcctgcctctgcctcccaagtgctgggattaaaggtgtgtgctaccaccgcccggtgacttttttttttctttttaagaaaattatttatttatttttatttgtatggatgtcttacctacatatatgtttgtgtaccatatgtgtacctgataccaaggcccaaagagagtgctgggtctcctggaagtggagttacagatagctatgagctaccatgtgggtgctgggagtcagatacagggcctctgcaagggcagccagtgctttagccactgagccatctttgcaacccaacaatggacatttctttcttttattttttgattgaatcttcccatgcagtatttttaatgaaattttctcctcctccagttctttctctattctctccacctccatacccacccaatctcatgtgttctctctctcttaaaaaaaaaaaacaaacaaacctaaaaataccaaaaacccaaacccaaaacactcccaaacaaacaaataaccgcaaaatcaaaacataggcaaaacccagtaagtcaaaaaaaaaaaaaaaaaaaaaaaaaaaaaaaaaaaagagccaaagcaaagcaaaatgcttggctttggaacttgtgctggagtatgattgatgtactcagtagcatgttgttggagatttgtgattcccccccccccaccccccctttggccacaggtgtcagttgcagatagcttcctggttagggatgggagcccatgtccatttccccctttcagtgctaggacctactctggcttgaagctgtgcatttcttctgtatgctgtcacagtctctgtgagttcatatatgcataagttctgttgtctggaagacacattcatctcttcttttttttttttttttttaagatatatttatttatttaacatatatgagtacactatagctgtcttctcacacaccagaagagggcgtcagatctcattacagatggttgtgagccaccatgtggttgctggaatttgaactcaggacctctggaagagcagtcagtgctcttaaccactgagccatctctccagcccacattcatctcttctggttttacaatctttctgcctcttcctccccatagatcctggaggtgtgagggaaggggtttgatgaagcagcctatttaagactgagtgctccaaagtcttactttttgcacattgtccagttgtagatttctgtgttcattccagtgtacggttagaaaaagcttctcttaagggagttgagcattgcagtgatccatgggtatggtgatatgttaataggagtcatttaattgctatgtttctttaacagagtaatagtaattagttttgctctaggccatgacctaactagtctcaggttcctggcccctttagcagtgtcaggtataggttctatctcatggagtggccttaaccccatcagaaagtggccgtcactcccatattccttgtgactgttcactagtatgtcctgtaggtaggtcacttctatggatgtttatttcttaaatgctagatatggagcccagtagccctgtgtgttcctcgtattgctttccttttcccgtagaggctgttaacttgtgtctttcccctctcactctttaaaggcattcttgctgtaggtagtgtaacttaccgacagactaggtaagttatactagaaatatattttcacatagttttgcatgctggcagtacacagatcaaggtgcagatagacttaattttctataagtccctgtcgtttactaatattctgccatgctgaactataattcttcagaagtaattggattgaaatacattcagatcttgttatgccaggaatatgcctaccctccctacagcatccactcagcttggggatgcgtactcatccttcaagaccatgcttttcccttcccctgtgaggaagcctctgctaagcttactagagtagaagtaggtaggtttcccttcgtaacagcttaccacggtctttacagtatattttaccttgttttttccccttgtagaattgaacgcaaaggttcctatggtgtatttagaaatataccagtagaggctgtttattgttaaacactgtgagtgtaggtggagttatccgagtggtacaggagcatcctgagaaggttagactgaggaggcgtaaaaagggagaggcttggctgcttcttgtggctttactcaactatagtagagacaaggaattatctacaaattgattactctttgttgttgtttgtatttgagatggtgctttagtatgtagtcttgggaagtttgaaacttgcccgcccatagactgtgttggcttgaactggaagagatcatctgtgccttctgggtgctggggtttcaagtgtgactgtatttggccaaattcatttaacagcttttttttttttggttgttgttgctactaatctagttcatttaaaccaaacatggtaatacagaaaggagactgaggtggcagctggccagaatctttgtgggtcacagatgcagaacagctatgcgtccttggacccattcttcagtaacagacaagtcagcttatcagctattttttattactctatgccaggtattattctagtgtctaggatacattttgagcaaatttaagtccctcttccctggccattaaatttaaattgagaggctgtacagtaatgatgtatacatagtaacatgtcagggttataacagtgttcccagaaagattacggctgtcagacgttagaacgtctggtggagggattgttatgcttcgctttcgttgtcaacttgacacaaactaggctcacccgggaagtattgtccccctcatatggccttattgccatgtctgtggggaattttcttgcttagtatacattgatgtagcagcccaacccagtgtaggcagtgctctccccgtgcaggtgagtgtacctgtatgctttcttctctgatgagatatgatggcatatatgagtgaagaatacacatttttaaaaaattatttatttattttttatgtatgtgagtacactgtagctgtcttcagacacacctgaagagagcatcagatcccattacagatgggtgtgagccaccatgtggttgctgggaattgaactcaggacctctggaagaacagtgctcttaattgctgagccgtctttccatcccgaatacacatttttaaactttacgtagttcatgatttgttaggtaagctacagttaagcaaggaaataggtataatcatagaaatgtttagaagctaggtcagcgtgaggtagtgctttcctgtcttgtgcagttggagatgtccacagaaggtcatgtttgtcgtgagcagtaacttcagtagtgctgctcagtagcagcacgtcacagctagagactagtgtggtgactcatcagagggatctagcagttttgctagaatcagggttaattttttttttctctacaagtggtcatccccctttctccttcttccaccctccctgtttctatccctttctttcttccaagatctagctatgtagcctggcctggccctgaattcataattctccttccttagtctacagaatgttgctgggattacgatgtgtaccaacatgcctagcaccaatattaagtttgtttgtttttcctcaccttcatcccagcaccatagagggagaagcaggttggtggatgtttgtgagttcaaggccagcctggtctatacagtaagttccaggacagccagggctgcatagtaagatcctgtctcaaaaatgaacgaaggttgtttaagttaataaactgtccctttctttaagctttctaacaggtatcgtttttatattaaatttgttatatctcttatgtttctggttttgtgtgtgtgtgtgtgtgtgtgtgtgtgtgtgtgtnnnnnnnnnnnnnnnnnnnnnnnnnnnnnnnnnnnnnnnnnnnnnnnnnnnnnnnnnnnnnnnnnnnnnnnnnnnnnnnnnnnnnnnnnnnnnnnnnnnnnnnnnnnnnnnnnnnnnnnnnnnnnnnnnnnnnnnnnnnnnnnnnnnnnnnnnnnnnnnnnnnnnnnnnnnnnnnnnnnnnnnnnnttgagtcttctgaggataacaggtgctcttagctgctgagctttgttctagccccatggttggttcacttgcttgctctttgaaaattattatcattattattattattattattattattactattatttttggtttttcaagacagggtttctctgtgtagccctggctgtcctggaactcacttcgtagaccaggttggcctcaaactcagaaatacgcctgcctctgcctctcgagtactgggattaaaggtgtgcaccaccatgcctcgcaaaattatttttttatttttttgagattttaattacattattttcctcttccctttccaccctcccatatcctcttctttgctctcttccaaattcatggacttttttttcattaattgttttacatacatatgtgtatagaacccaggttcctgtgcatgacaggcaagtgctgtactaagttacatcccatccctatttaaaaaaaaaatgagatggagtcttgctaagttgtccaggctggcctagaactcttgattttcagaaatctgcatgggggacatttaacactggctcttttgaattgtagtggtacacacctttaatcctagcacactagtggaagagtcagcctgagtctacataacactagtggaagagtcagcctgagtctacataacagattctaggcagctggggctacatagagactctgtttcaggcaaaacaaagtattctagcacttgtaatcatctgccctttaagttgacagtatctttccaattaaagcacctgctttaaactatctcaactcataaacgaaagtgttgacaggaagcaacacctttatgggtgttgaggacttgtgttgagaggttgtgcattctttggtaaactgtttattatagttatttccaagacactatctcttcaacctttaacacttaaaatccacatttatttatttgtttggtgtggtgtgtgttaccacagcatacacggggacaactttgtgggagataattctctgaactatgttggtcctggaatttgaatgcaggtgatcacatcaggcttggtggtagatccttgagacatcttgctggtcttgcttttttactctgagatgtggtctcattacatggaccaggctggccttgaactcagggtgccagcatagttagatactcggaaggaccattgctgattgcagactttttattgtatccttatatgacagcaagaataaggtggctctctggtgtcctcttcaggcacatttagaccatgtttgggtaatacctacctaacttctcagctccaaatacctaaattaggccttagattttagcatatgaactggggaaggtacatagtcatttatcacataacaggattgctgcagactggactcagtcgcccctgtgggcaaggagtcggcggggtgacagacacgaacacagggagtgttgatctgaatgtaatttctcaaagtgaacatcagacttatattacagaagaaaacaaggaagttaggtgattcattaaggtcatccaaggtacattgaggttaccggattcaaattgactctttacccaaaacagagaaatgcatacacaaaagctgacaggaaccaggcagtgtttacaactgggataaaaaaaatcagtgtttacaactaggatcaaaagcagtgtgcccttgccattgttaattcaccttcttcctaggccattgtaaattcctgtatatgggagtgactcagctgttattctaagtatttactctagttctttcttagaccacacccttccttcttcctaggccattgtaaattccttcacatgggagtgacttagttgttattttatgtatctgtagggaacctccatttatcagagaaaccaaccaactttcttctaatatgtaatgtagtctgctatacatgaccataatgagaattctaagtttactttgttgaactagccctgagatttctagctcttatccagtaaattgtaatgcctgatttctttcactgtttatcaacaatggaggcttttcgtctgaatgagtagcattacctataatataacaccaactttcgcaagagcacatctggagcattcgtgcagtgggatgccaaggctccaggagactaagtttccgtgaaactttttgcctctggactgcgtccaagcttttgggccacacagacttcactggagtgggtgtggcacaggattttcttatccctcctttatttttgagacattcctgctatatgcaaggattgcacatagctcagtttatgttttaagtatcgttgagtgtgagtctctgtcgctgtccactttgagtgagtttgctaacactagggaggggaggctgaggtaggaggattccacagtaggaaatcagaatttggaaacttgaggttttgtgtatgtgggctctccagtttcatcttacatttactttttgaaacaatagaagacaattttctttagaaatatattgctttatgtgaagtaattgcagttatgggcgttctaagtaatgttgtagctagtggataggaaaggtcagaatgtgggtggccaggagaaagtgcttttcaaaccctgcaggcttccctccacttatgttattgtgcatttttggagtagatacaatgtgcattcaagtgtgctaacctaccattgcaggcttccatggatctcaatagtgccagctctgtggttcttcaggtcctaacacaggccaccagtcaggatactgctgtgttgaagccagccgaggagcaactgaaacagtgggagacacagccaggtttctattcagtgttgctggtaagtagttcttgagattgtttgtttgtttgtttgtttgtttgtttgttttgttggttttttttagggggcgaaggttttagagacagggtttctctgtgtagccctggctgtcctggaactctctttgtagatcaggctagccttgaactcagaaatccgcctgcctctgcctcccaagtgctgggattaaaggtgtgtgccaccacgcctggccagtttattttttaatacagtgagaaatcattattttactagctctgtacctatggagatttacgtacggcttactgaagctgatccagatgcttggctgccattgtcaccatcaccacggcagtgtaaggctcctgagggtgttttacaagtggtttttgatgaatcaacatttcaatgaaaacttttgttttttattttctgagacagagtttctctatgtaatcctggctgttctggaactcactctgtagatcaggctggccttaaacggaaagaaatccacctgcctctgccttcccagtgttggggtcaaaggcgtgcaccactactacttggcctaatttaaacttttagtagagaaagtcactttctttggctctgtgttttggggctgattaatgactttctgcttttattgtccaagcattcattctgtataagaactggacaggatatattctcagtgtctgttgagaactatcagactgtgatggcttttcagtttgccacacccgtgctgacatgaagacggtaggcagtgtcttctcatccccgtctcagtgcagtctcagtgcattgacttagactcgctctgcatcagcatcaacatcaggaacaccgtccgtgttcaggatttttcagtttttttcttttattagtttttttttttttttttttcaataatagaagcaaatctagggtctagtgcatgcaaggcaaggactcaccattgacctggtctccctttgtatcctctatttcacttttaaacattgtttttggttttgctgagacagggtctcattgtgtagccctggtttgcctggaaattggtatgtagaccagactggccatcaacacagtggtatcaccatgtctctgcctcctggttgctagaattaaaggcatgtgttcccatgactggcaaaatgttgattttttctcccccatctaaaaatttaatctttttttttaaaaaatattatttattttatatatatgcgtgcactatagctgtattcagatacaccaaaaatgggcatcagatctcattacagatggttgtgagccaccatgtggttgctgggaattgaactcaggacctctggaagagcagtcagtgctcttatctgctgagccatctctccagccctcaaatattttcatacagaggatcttttatattttctggcattgaactctgttctctgcctccacctcctgaatgagtgtatgaattactaataactgctaagataattttttctccttttttgcttctgcattttgttttgagttaccattagttgttgtattggtgcattttcataaagtgtttttatttattagtgtatatgtgtgtgggtatttatagtcttcgggggaggggattgttgtatggcagctgctgacttcagattcagtgaccctcctgtccagctccccagtgctggggttccaggcatctgccgccacacctagcctgcacatatagacatttgtataaagtgctgtgtgcgtggcttctgctgctctggtggatgacattggagcagtggttctcaaccttcctaatgctgtgaccgctgaccacaacttcctcatatcgtggtgacccccaaccatagcattatttcagtgctacttcataactgtaatttggctactgttacgcacgtaatgtaaatatctgacatgcaggaggtcccacagctggagaaccactgctttggagagtcatgcacatatgcatacaaaatacatacatacatacatacatacatacatacatacatacacatacacgggcacctggttctttttttttttttaaagatttatttatttattatatgtaagtacactgtagctgtcttcagacactccagaagagggcgtcagatcttgttacagatggttgtgagccacaatgtggttgctgggatttgaactccagaccttcggaagagcagtcgggtgctcttacccactgagccatctcaccagcccggacctggttatttcaaggctggcttcaacatgcagtgtaaccaaggatgagtttgaatttctgattctccagcctccactggccaagtattgggttacaagtaagctcctccatgctcagattacaagctggtggagattgaacctggggctctatgcgtggtcagcgagcagtgtcccagctgagttataacttcaaactttaaaaaagatggagttgtactctctagcttaggctcgtgtgcagtttgcttcctcgaacaggctagttttgaatgcttcttgcctcagccttttgaatgttgaggataaaatagtttttgaatagggcatggtagccccataatcccagcactcaggaggctgatgcagtgaggcaaagatcttaagtttgaggctaggttggtctacgtagccagttagtgtaccgagtctttctcatacccaccagcagcataaataatgacatggaggcttctacagtttaagggttaggccttttgttagggtagtcttccaattggctcatctaatttgacctgactgtcagacctatagccaaccctgtggctagctgtatacctttcttggctctactaccatctgatttctttccctccgccatcattctctctctgcctggaagttccacccccctatttcctgctctagatattggccgtcagctcttattataactcttattataaccactcagtatggagacaacctctggtctatttctagattgcctttagtcaggtgaggaaagatgaatatttacaaagtagaaaacctggtgatgggtcaaagaaatgacaataccagaatcctgccagcacttagttctctgatggtacagaattaacaaatgaaaatacagagatacacctttacacaaagcaaagaaagattaccccaacaagttaaagtctagcctggacatgtagactcatagcagcactcatactgagggcgatggaggttcatcttgctgtgtggtacttgctggcttagaacttgttatatggcccagactggcctggaactcagaggtggacctacctttgcttcctaagtgctacgattaaatacaagcaccagcgtgcctgctgtgcactgggattattttacaatttgttttctgtgaatgaaggttttgcctgcatgtatatatgtatgtatgtgtaccatgtgtgtgcttggtgcccacagagaccagaagaggccattggatactcctggaattattgacagttgtgagccatcttatatgggtgttaggaactcagtccaggccctctgcaagactaacaggctttctccattgagccatctttccaatttcccaggctaacctttttaaagcctattagacaatttccccattgattatcaagatcatgttgcatggtttaactgcattcttattttcatagtttggcaccattgtgcaaagcagtaactatggattagtgatttgactaacatagcttgttatatcacatctcacctttattttattttggtttttttttttttggttttttgagacagggtttctctgtgtagccctggctgtcctggaactcactttgtagaccaggctggacttgaactcagaaatccgcctgcctctgcctcccgagtgctgggattaaaggcgtgcgccaccacgcccggctttgttgttttttaaatcgtatgagtgtgtgcttgtgtatgtgtgtatgtgtgtatgtaccatgtgcatgcggtgcctatggaggccagaagaggtcatgagatcccactggaactgtagttacagactgttgtgaccctccatttgtattctgggaactgatgccaggtgctctggaattcttaactgttgaccatttctctagccccatgagcgtgattgcattggtaagtagtcttgttattgtgaaataggttattgttttcttttttagttacttttcctattgcgataaaacactccagcaaaaccaatttatggaaggacacgtttattgggcttcattcacagttcgagaatccatcgcgtcttagttgggaaagaatggcagcaggagcttgaagccgctggccacagtgcatccatgctcaggcagcaggatgcggtgaatggctatgctgagctaagctgtctcctgtttctgtgcccagcaacagggccccctacttttagagtgggtcttctcaatttagttaggtctagtttacgtttagtttagagtaggtcttctcaattcagttaacccaatcaatctacttgttacttccaatttttttatcaagaaaattttctaacatacttgaaagaatagtataatgaatctttacatatttatctgttggttaaacttaatgggatgcttttgaattggcatgctatcttctgtttatcccagactgactgacctggaacttgagatgctcctgcctgagcatcaaacgctggggttgcagtagcacctgcctaaggagacctttcttagagtacacagtacaagtatatattttaagaaaataccaatacgatatatgttgtgatgaagtttaagcaaaataaataaaaaaaaaaaatctgggccaaggttataggccagttgctgacctactatgcatgcagccctgggttcaatcctcagtatctcatgagctgagtatgggggtgcaaacctgtgataccagcatctggaggtggaggcatgaagttcaaggtcattactggctgtgtagcaatgcatattggccagcctgagatactcgagatattttctcaagaatcaaacatgtagggatgcttggtggagtgtttgcctcacagacatgaggactccagtttgatcctcagaactcaatgtaaaagtgaccggggtggtggagccagagacagggtggtcctgggaactcactggcatgccagtctgacctaataggaggtgtgtggcacttctgagatgacacctgaggttgtcctctggcttccatatgaagccattcacacagtgaacatgcacctacatgcagtagtacagaccctcaaaaaatatgcaggcaaatccatgccttattttggtatgttaattatatttttaaatgattgcatgtttattctaatgcaattgtttttattcacagaatatttttacgaatcacacccttgatataaatgtacggtggcttgctgtgctgtattttaaacatgggattgatcgttactggaggcgtgtcgcaccgcagtaagttctctcggccggccccaagtgtaacccattcctaaagaaagaagaatgagatggcgcccgtgtatgcccaaggcttcgtcaggtgtttatttgcacaagcgctaaaattggggcagcagagaagtgagcatgatctttgtgtaaggacggcatggagatgtgcaaagcacctgatgtgtaaaagaaaacaaatgtgctaaccactggagaaatgtatttgcatagttcaacagccacatcattggttttctacctgggtttgtgtcctcccatgtgtgcgtgcttgcgtgggtttttgcctgcctgtcttagtgttcagtttctgaggatctgaggtttttctttttttattagatttttttaaaatgttttgatttttgaaaaggaaatcctatattatatctgcattcaatgaatcttcatttctgggtcttgcattttctctgggaagaatggatggatatcatgcttttacagtttcattagactaagctttaactaagagtaaagtgagaaggttcactttaagaattaattaacacataatgtagtttatggacaggcagggcagacaagcctgtaattttgttagaaaatggattttgctgaataaataacattagctttgctctccagtaggtggcactaaagctctataggttatcatttggataagtaatgtaaattgttttattctgagtatttcggagtgcctgtgaagcctacccttgaacagtatcagaaagtactggtgtatttttaggccaaactttagtatgaagctaaccctttttttttcaggagtaattgatggtttggatgaaaaatgaagcaattgatgatgagagatgtgtgcttgtttgtttgcattttgggacaaggttttgctatatagctgtggctagcctagaacttgctgcatagaccgggctggcctggaacttagagctaagcccttgcttgtgcctcttgaattcttggagtacaggcacgtgcctctatgtctggctaaactagtctaaatataaacagttaaggaaggaatcatagtgttgaatagtcacgctgtcttctagtgtttattgagataaacgtgggcctgaagaggaacgcacttacaaaggtcacagagttggcgggttaggagttgattttagctgcatattgaagcactgaaaagtttgtggttttgctgttagttatagttcttattctgaccattattttcagaggatgagaatcaactaacttaagcttatgctattttcatacatcattcagtttaatggccataactaggtgctctccgttctgtttgaggtcaagcctgaatttaagagcagattcattgtgaagatttgctatatggactgattgtgtgcacagtgcatctgtgaagtaggccacatggccttcccttcgttgcaggacctggtgccttcttctacagccaacacttttgtttccgttttctgtgttgaagatttttcaaaattaaattcacatgttgttactattttgtaaagacttatcagactgtgtgtgggttgctgtcaaactccttccagtgctgggagtgcagacgtgtgccactgtgcactctgtatagaggagccatgagatgtccctggttggccacaccagtctttcctttagttgctgggtttttttttttttttttttctttaaataagatctcacatactttttattttttggaattaatgttcttttactagcttgatgagatggaagtttggataagtttattttcaggttttttttttgttgtttgtttttgtttttctttttgtttttttttttttaaagatttatttattgtatgtaagtacactgtagctgtcttcagacaccagaagagggaatcgggtctcattacggatggttgtgagccactatgtggttgctgggatttgaactcaggacctctggaagagcagtcagtgctcttaaccgctgagccacctctccagccctattttcagattttgttgttgttgttgtttttaaatagttgttaatctaaagcccacgatgctccacaatctgaagctgtcagttgctgctctgtaccacaggaagggaactctacaaaccgacctcaggttataaatctcagctactgtgtgagtgcagtatcctcccaggttacctttaggccctgtgtattaggtgtgcataaagcatggatgtagggctggagagagggctcagtggttaagaacagtgactgctcttccagaggtcctgagttcaatccccagcaaccacatggtgactcacaaccatctgtaatgggatctgatgccctcttctggtgtggctgaagatagcaacggtatactcgtataaataataaataattggaaaaaaaaaccatgaatgtatttcatgttggacttgggttctatcttaaagatagaaatacccaacaatctgaaagaaataacctgaactctgaaattgatttctgaagcactttggacatgacactctgcctgtgtggacatttagaacactagagttttcgtgtaaccatgacttcagttcagttgcaaaaacctagaaatgtagtcttattttcatttcattcattctgcctaccgattggttgatgggcgggaggtggatactgtgtttttcccctgagctataccctagctcctcattagcattttaaacagagcatagtggctcaagcctgtaatctcaatttgaggctgaggcaggaggattgttatgagtttgaggccagcctgggttgcgtcatgaggtctgggtcagcctggtctgaagagtgagatgctgtctcaggtcaaatagaattttttttttttttttttttttgggttttttcgagtcagggtttctctgtgtagttctggctgtcctggaactcactctgtagaccaggctggccttgaactcgcaaatccacctgcctctgcctcccgagtgctgggattaaaggcgtgcaccaccactttgttttaaattttgcttgaattatctttttttataagaaagctttttagtattccacaaggatcacagcagccatggcagtaacaggcttgccaactgaatcgcttttctgacctacagctataggttaatcagcaacattttgtcaaaaaaaaaatttttttttttttcgagacagggttcgtctgtatagccctggctgtcctgaaactcactctgtagaccaggctggcctcgaactcgtcaatttttaaacatagagattttttttagtaatttttaaattattttttaaaaataatattttcttattttaccaaaatactctaagatggatagttaatgacttatcagcatttgaaaacgtgttttgtagttggggattctagtgttttgtgtatgtcagttatctaagatctgtaaattatactgttaagacttctgtatctattgcctttttccatgttttctgaaaacttctccaaacaccaaatatacttgcctattctttctcagtagactttgcttcctgtatattgaggttgccatagtcccataggtattcaaggttatagtagtcaagtcttatgaaaatgtcctcctttagcgttagtaatgagtttggacttagagtctagtttgtctgacattgagagagccccagcagctacgctatggctcctatttgcttgttatgtctgtggttggtgttggtattatgtctttttcattattactttgtttcatttccagttagttatttttataagtagcaaatagatggttttttattttaaaatgtgtgtgtatgtgtgtgtgtgtgtacgtacgtacgtgcgtgtgcgtgtgtgactacatgtatatgtgtgcaggtgcctggggaggcgtgggatgcactggagctagagttacaggcagttgtgagctacctgatgtgtgtgctgagaatcaaactcttgtcctctataagtgcagcacatattcttaatcactgaagcatctctgtaggttgtgggttttgcttttatccaacatggcacacgtttctattttggtattatgcccattacatttactgtaaggactgaatggttgggatcaaatctgctacccactcattctctcttagaaatagtgctgaatgctgatatcgtgtacacagatgcctgttagagttttatatctatttttatttactttttgttttagtatttatttttgattttttttttttttttgagacagggtcttagtgtgtagcactggtggtcctgaaatttactgtgtagatcaggtttgtcagatttacctatctgtcctctgagtgctggaattaaaggtgtgagccaccatacatggctttgttttagtttttaaagacagggtctttttatagccatactgtatatgtgagactggctgtgaaatcctgatactttgcctccacctctaaagtgctgctagaattacacagtgctctactgcacacagcctggcattcatgttttgtctccagtcttcatttccagtttatccttgagtctgacttgagattattcaaggatttgggaaaaaaaaaaaaaaaacatgttagttcacttgttctctttgaaagcttgtgtagcacaactttacaattcaggtgaataccattgtacttgtcatgtattagagcgtgcttatgttttagcacattacgtcagtttttctacctaatgtaagaacctcattataatactttaactctatttaagccttcctatgtaatgctgttatgggtacatattttctactaactctgtctgtctgtctgtctgtgtatctatctatcatctatttgtgtgtgtgtgtctggttgagcacattccatgtcacatgtatggaagtcagatgacaacttggagttgtttctcttctacaatgtgagtttcaggaattgagctgagactgtcatggttagatagacaagcgtttgtctgtctgcctgcctgtctatttattcatttatggcagggtctcctgtgtaagccagactgggcttgaactccttgtcctcctgtttgtggttcttgagttgttagcagtggacactcggtcagagctacctgtctccgtctccactgactcactgtgctccattttagaatctctccttgatacttaagaacaaaacaaaaccagattctgagtgtccactgaaattctccatctcctacatacttaaaaaacagttacttttaagtgtggttttggtgactatagtgcctgcttgtgttttgaatttagtcatgtattggttagtttctgggctctgcatagtgtatgttttgtttggatgctaacatagtataattacagttggagaggctttaatttctgttgtctttcatgagaaagaatttaggtaagcagacaggatatggccttaaccttgatgtagctaagggtgtttttgttgttttgttttttggtttactgtttacctcaggttaaagcttcccggggattttaactgtacgccttgggtgtttgtcctctgtgatgctgctttctgtcgaccttgagttctctgcttccctagtgcttcgagtcctgcagaaatctctcgaactgtagtctcttggctgctgctttcagcttgtttttaagatttttttcctggttgagtaccgaagggatgcttgtattggctcatcacacagtacagtcttttcttgctgagactgagttcttctgccctgactgcctcttttgttttggggttgttggtttctttagggtgccatgccacaaactgaatgtttacagttaacctaggtttattctcctacagactaggtagctggaaatccacaagcacaaagtttgcctactttgagggcccatagggttagtctttgatagttcctggttgtggccagcaatagtaggtgtttcttggcatgtgattgaatgattctaatctttgcccctataatctttgcctataatattgtcacatgatctatgccaagtgatttgtgtctctgtttccattttcttcttataagggcaccaggataggcatagaggtacaggcttgtaatcctagtgaaggaagataaaatattgtaacttgtgagtttaagagcccacagcccaggcctgggactaagaacaaagcagaacagcctccaggcatggcagggcagggctgttgttaaggcattcctaagaacatcttgactgtaaagataaaaaggtatgcaaggaccagcagggctatattatctaagtcaacaccatctggccaaacctcccctctgtctattgccccttggcaccgggtaaagtcatacatcaactggttgctgtgtgaacaaagataagcccccagcccacaggaacaaagtcctgatgccctgtaatctttctgttaatgtttgaataagccaatagtgtgtcactatgctgaattccacacccctaagccccttaccccataaaagcccctggctttcaagcctcgtggccaacatccgttatctcctgtgtgggatgcatgtcagtctggagctccgtaattaaacgtcctcacgtaattacatcaagagatggtccttcgtgattttttgggtgcacgccgagtcgggaattgggggggtttccccactagatctaacactagcacttgggagattgacacaggatttattttcaaggccttctgggcttcatagcatgtttcaggtcagcctagcctctatatcaagaccctgtgtcagaacaaaacaaagcaacaaaaaggaaaaaattccagtattagaatagagtccatcaactcagaatgatttttgtcttaatgtgatttaatctacaaagactccattatttccaaatgaagtagtattcaaagatacttgggttatatgacttcaacatttaattttgagatatgatttagctcataatatatgctttgctttttttttttttttaattttggtttttcgagacaggttttctctgtatagccctggctgtcctggaactcactttgtagaccaggctggcctagaactcagaaatccacctgcctctgcctcccaagtactggaattaaaggtgtgcgccaccaccgcacagctatactttgcttttaaaaactactttacttaaaattcatttattatgtgtgtgtgtgtatatctggtgtgtgagtgtgcatatcccatggcctgcatgtggaggtcagaggatggtactgtgcagttatttattttctcctcccacctttatgtggactctgaagaaccaaactccttgtaagactttagataaaactgttttactcacagaggcatcttgttggccctaaaaggtatgtgtgtgtgtgtgtgtgtgtgtgtgtatgtgtgtgtgtttgtttaagatttctggaataatttgtctcatactagataaactatcataggcagaatgaaaaacattaaaatgattaaattttaatttaaaaatagataatataaaagctggacatagtggtagtacacatctgttataacacttgggaaactcaggcagaaggattttgagtttgaggactgtttggcccagtttaaaaacagaagaggaaaaatataaaaatgtcaaactactgaaccagtttaacattcaacatatataaaatccatagtaacttctctatttagctcaatgttttctttctttgtatatagtaaatttttttagtattgcatatatcctttccaaagatgaaaaatgaaggacaaagttaattaattaatcaatttttgaggcacactttgtttagtctggaactcgttgcatagatcaatctagactcaaattcagaaatctgtttgtattgcttccagagcagtaggactaagggtgttcactcagacactcacccagcctgctttatcaggtttgtgtgggcgctgcttacatttgtttgtttgtttactgtgtgtgtgtgtgcgcgtgcgtgcgtgcacacttatgtgctggtacgtgagtgctggttggagatcagagaacaatctgtaataattctatccttttccccgtgagtctgtgttgtcaaacttgactacaagtgccttttcctgatgccttatttcacttacattctatgtatggttgtcttgcctgcctatatgtacatctgtgtaccgtgtatgctcttggtgcctgcagaggctagaagaaggtttcagatctcacacgtctgcattacagaggcctagaagttattatgtgggttgggaacgtggcctgtggaaaagcagccagggctttaactgctgaatcctctcgttcctacatgcaacatttataggaagagttagaaagaaaccagaagtctgatctgttgagttttttgtagacaagtgtttttatattcgtaaggtgagcatcaacatacttcattatcactctgaatttatcttattttctgtagattactgtattgtgctttctgtttattcatttgggaaggagctttaggcttctcacttgatgtgtgccagcatttaagtaatggcaataattctacttaaacctaagcagataatcatgtatttaaaggagttttattgttagaattcatagcattcttgattctcttgctactgggtggcattctcttgtataataattttacttttttttttacagtgctctctcagaagaggaaaagtcaacattgcgtgcagggctcatcaccaactttaatgaaccaataaaccaggttagtgacaaaaaaaaaaaagaaagctgagtggagagtttgaggccatcctgagatacgcgtcaggtcccctgccctgcccctaccaagaaagaaagacaaaaaaaaaaaaaaaaaaaaaaccctgaagagtcaaacttgtaatttgtgattagaaagacattttgatagctcttagagtctatggaccactgcattaaatagtttagtgtagttttaataatatttgctcaacatagttaattcctgagagttaatttcaaaatgcgagtgtattatttatcccttgcccttgatttcctagttactccccatggtctctctctctctctctttctctctagattgcgacccagatcgcagtgctgattgccaaggttgctcggttagactgtcctaggcagtggccggagctcattcccactcttgtagagtctgtcaaagtccaggatgaccttcgccagcacagagctctgctgaccttctaccatgtcaccaagacgctggcatccaaacgcctggccgctgacagaaagctattctatgatgtaagtatttaacatgattacatgtgattatgacaatagtgacatgtgtataaaaatgactcatttttcttgtattaatatttttggaacgattttgaaatctttctaatctacactgcagtggtatgtatggaaagctcacgtaggtgtcagtgaggttgcttgtggtaggaaacactttgaaagcagagaaattggtttgagattgtcagtgtagctgagatgtgataacggatctcttcaggaaagccgttcaaaaggggatggttagcagtaagattggcgtgtatagatagttgatgggtgtaaaatagagctacaactgaaagattatgttagttacctgtgctctagtgatgatgctcaacagaaacaactcatgggaggggtttattttgcctcttggtttcagtccaacatgacagggaagacagagctgatgttggcagacattatgtggtagaggcttcaaatcttggtggaccaggaaggtgagagctcaaacaagtgttcaccctactaattttgctagggtggccacagtccctaatgtttcaaagctttacaaaatagcaccaccagatatggatcaagttcttaatctttctttctttctttctttctttctttctttctttctttctttctttctttctttctttctttctttcttaaatttaaatgtttttatgtgcattggtgttttgcctgtatgtgcgtttgtgtgaagattttacacctggaactggagttacagggagttgtgagctgctatgtgggtgctaggaattgatcctgggtcctctggaaaatcagtcagtgcttgtaactgctgagtcatcttcctaccccaagtttctaatttttgtcttaagacagggcttcttatggttcaatttggcctcaaacttgctatgtagctaaggaagactgaattgctgatcttcatgcctccatctcccaagtgctggggtgacctaccacacacagctagtttctaatattgacagacctgagcccacccagcacattccatccaaactctttcagggatggcagtcttttaccagctgttactttctccacttttcttagtatggttttagagctggctatttttgacttttcagaatagcaatttcatattgcttatggtgacattttggactgtaccatgtaatactgctgaatttgaaggtgtttgttttggtgttcttattgacgtttggtagttatgaaaaacatgcataattagaaagtttatgataggactcagaaaactaaggtatttctaggacattgttttgcgtggttctttttccttcagtgttctgtcactcaggctttcccagtgatccgcctttgccctgcaggttcttcacttaacatgtggtctgaagcagctttttccaggcttgctctcttctgacagctactcttcctcatgcttaagctcctgtgtagaggtgtatgcacatgcacccatgctttcttccctccgccttttgtttttaaaataaagggtattctggcacagctacagccagaacacctgacagattctaagcgctgtgagatgctttatttatttctaaaggagactcctagctgtacatggggaggagtaattgaagagctggcagcttgcggaagatagacagtttaatggggcagccagagaaaagagttccagatgagagtctttgtaagcctctattctttcacaaaaagctagctaacttttccctggtgcacagtgtagtgcctcatgtttgaggatagtttagggaaatagggagaagtgtgtatttttgggctatctctcatgttcaatacattagttttgacagatgcagtggtatacacacacacacacacacacacacacacacacacacacacatatggtcaactacattttgactaagggcaaagagtcacttggtcaggagttgtagactactccagacaacatagccacaaaaaaagggaagaaggaacagcaacaaatgcacattagttttctgtctctgggtcgcaggtgatgaggttcagagccactcttctgagatcctcactcctgagggtgtagcttataaatcttgggtcatggcatttttcttctcttctttccttcctccttcctgtctgcttctacttcttcctcctcttccctttcctttctgaaacagcccagactggcttcagatggccaagggtggccttgcattcctgttcttgtccctgcctcccaattctgtgctgtatgtatatgtgtgaggattacatgcatgccgcaccacgcttgtctttctagatagtaattcttacatactcttatgttcttcattttaactttgttggtttaaataccctgtcttacttccagcaatgggcagagaaaccccttgttggtggtggtgttctgtgtcagtcaggggcagagcagatggcagtcctttgtgcatcctagcttgacacctggcttggtagccaaagctgttttatgcctaggactcataaaaatcaaatcaagccaaatcagatcaaaggtggctcagaaagaggaagactgacagagaccttcagatcaccatgctacctacagacttgccttctagtgaatggcacaggcaggccatagacatctgcttgctgacattccacatagcagcatggatggaggatgtcactcagggacctgctagctgtgtggccagcctgtacctggagcctccacagtgtgcgagtatgtggtggacagatgggagagacagagaaatggagcagctggagcattgtgaaaagagatgggactggagactcaggagtggagaggagtagcctgttgtgaatggccagccctgccacctgggccatggtgaagtcaagctctgccgtagctgtcactgagggccatgtctgagtctgtgactacgaagtggcagtggtcagtgtcaatgaccatggcttatattaccactagagaacttgaggatgaccctggttggggcagccactgggaccgcctgaatgtccagggactgtgcagaactggccctgtcccttactggatgctcctctctggagggctggccccatctctcactactgacagcacgtggaaagcaggccccttgccttgctcaggcagcacagaagagctggctctgaaggcggggagtgtgtgtgtgggtgtgtggtattggccctaaggatgtgtgtcgcgtcccactcgactagcaagaaagacgcaaccaccggttcttctgcggcaagctttattgcttcttcaggagggaagaccccaaccctggaaaatggtgttgcttatatagccctcagccatggcgtttcagcacctgatgtggcgtgtcagctcctgatttgttgctcgcccatcaccccattactacgctccgagatgggcagtgactaggcgtgagttcactctcgcacctgcgtacaaggcttgtttactagttaggcacagcggaggccagcgccatcttataatggcgattgctcgcagcatggctctccacagatgtgagtgtaggagagctgactctaccacttgtctgctattgggtggcttgggcacagaggtgatccctccctgtccccacctctggcagtcaggaaagctgctcacagagtcaatgagctttagagagctagctctgcccctcaccaactgcagcactccagagagcgggccctgaatcttgcctggacagcacagcagagctggccccagtggttgggagcaggttagccagccccaaggacgagagtgcaggagagctggccctgccatttgtctgttctgaggtggcatgggtgtgggagtgatgtgcccacctctcctcactttgttgggagagctggccctgcttcctcactgactttagcacttgggagagcaggccctgcacctttcctgggcaaagaaaagagcttgacttcaccatggtccaggtggcagggctggccattcacaacaggctactcctacagtggagctggcctaatggtgaacacatgggtgagccagcactgagcatgcccagcccaacacagtcctgctgttccaaagctacaggatctctatagtacagggcaacagcaggataactgagaggagtcctgacaagactgatggtgtcacagaagccagagatcttgaaccagaccagactcactgtaacagactttgcaagtgaagatgtgtggacagagatataccatggtatcatgttagcttgatttctgttgatttattttacaactgtgtttaaatgtttattttcaatatctgtgtataaatgttttgcctccatgtatgtatatgcaccatatgtgttcctgatgccattggaagtcagaattgagcatcaaatcccctggaactatagttaacagatggttgtgaaccaccatgtgtgttctggaagttgaaccttggtcctcttctagaacgtgtttgtttaattgctgagccatctgccttacacagatttttttttttcttttttgatatagccctggttggtctggaccttcctatgtagatagggatggcctctttcccagagaaccacctgtctctgcctcccaagtgctgaggttaaaggctgcaccacttctcccatttgttttgctctatttctaggagtcaggattaaagaaatgatctactttgtctttctatttttaaaaattaattaatttatttatttttatgtatatgagtacactgtagctgtacagatgggtgtgagccttcatgtggttgtcgggaattgtacttaggacctctgcttgctccggtcaaccctgctcacttagttcctgctggctccggtccaaagatttatttattattataaataagtacactgtagctgtcttcagatgccccagaaggggacgtctgatcttattacagtggttgtgaactaccatgtggttgctggaatttgaactcaggaccttcagaagagcagtcagtgctcttagccactgagccatctcgccagccccccccccccccctccttgcctttcaacgtcaaatatgtagaacattctgggttacagctaacctttattaatggttactcagcaataaaagtatgaattgcttgggctgttaaagggtacagtcttcttatttgttgattggttctcaggtatttgttttagcctagcagtcgcttcagtattatggttggctttgttgtagtgtcctttcagttcttttccctgtcttctgcgataaaagcctgcctagcatctgatgctaagcttggtggaccatttaccacattgtgctgaacgttcacttaactttctcagatcactgaggtagcacttttattgctgcagttctgctatctagcctagaaaactgcacatgtggttggtgcttaataactgttaagtaaataattaggctgagtatatggtacagtgattgagtgtttatttgcctaggaagagcacagggtctggattcagttcccagcactgaaaaacaaagcagccccaaaatacaatggaagaagaaatgaaggtatttaaactgggcgtggtggcacctgtgagaggcggaggcaggtggagctctgtgagtttgaggccaaactgacatcctttctagttagttccgagcctgctaagccatgtaataaaaccttagcttcaaaaaacaaacaagaaagtataaagcaaaatttcatgggaacaagctctttttagattatatagagctaaaactatctaggagaaagctgattggctgagcctagaagcacagatatgtatgcgtgtaggtcataggtgctaggacagggtctggtcgtgtaggatggaggtgcagatagctagctgtgtgggaagactgctatgaagagtttcgctgcttaagctgtccttactatattggcatgagagcaggagagctagtcctgcctcttcactggcgttagcacttgggacaatgggccctgcaccttacctgggcaacacaatggagctggcctaatggtgaacacagcggtgagccagcaccaagggtgtgagcgcaggagagccttcccagtccaacacaggctgcaacagtcagtcagtctgtttgtccgtcctatctatctatctatctatctatctatctatctatctatctatctatctatctatctaaatgtgttctttaatgtgccacacctgaggaaagtgaaaaacaaatgacttcatattcccgtcttatctgattattctccagttcttctcagagatatttttacatagcatttctttgaaccaggaggtgaactctatctcttaagatctcttaattaatttagaagagtgccattcccttcccttctgttctgttctgttggttgtctgccatgctgtgtgcccggcttctgtgcttgttgactgcttcttgctgattagtctcaggtgaaagtgtcctggtttctacagtttgttgcatggtgatacgttccatggctttaatattttattgctaacttttcctagtgggaattgtgaggacagtgaccttagtatctaagaatacttgagaaggtaagacaggttaagcctacgttaatggctcgctttgtgtgttggaaggggttaagtgtgtgcttctcaggtgaagtcaccaagctgtcggttggcggcactctatcttctggttagaaatagaatatcgaccacttaagggtttcgagagccagttctcaggagtgcttatcatatagcttatttgtgtagtgtcttcatgaacatacttccctgccatgttttttagaagaaaatgtagaaaaaaccatttgtgtccctcttacctggtttacttcactagtttgtcttttccgtctgagccttttatttttatttatttattattttttttaatatctaaacaatagtgctttattgaaaaagggttaatttaaatggatacaaagttgaagtgtgaaatgttttcaaactacatttctacaagtacaagttacttcttagtgaaagagcaagtatctgttagcaaaagcagtaaaactgaagggggttggaattgtggctgcaagacctcacaatccacactgccaatcttagatgtcagctggcccaaagtagcaccttaactcaaaaacatgggactcacactgaatacttgggaattccttcatttttttgtttgcttttaaatctctctccaacaaaattaatgtcaaaataagccaaacaaaggactgcatgggtactctaaagtcattgatgcttttcttgataggaacttcacacaatgacttccctgaccactcacagtgatgcaatgtgaaggggcaaagtgagcaaatgtatttttcctcgttaatttataaataatcatgcttaagcttcatcatattagtactactgagttttggcctgaattaaacgtaaatccctgcctcatcatcaatcaaagcccttcctccagcaaatgaaagcacacagttagtacctgctttgccccacaccactgcctccttcacctgccccttcccttctaaggccacggcctgacattagaagacagggtagaagggggaagtgccagaatataaaccaggcaggactctgcttgcctgcttggggcacagatctgaaaagcctttcgttcatggtgtgaagacatttatactacacacactgaagaaaatgacagtgcctagaaaccgaggagacagtctgcacataaaaaacccagcactgctattttcctttcaatagaaggatcactgaaaaggggaagagttagacgaaaacctggcaggcatctgggcttcaagtggccttttgttcaagagcaccacccagtcacaagcctggcgttggatccatgccagccaaggactatgatttccactgccatggtcttttgcacctagttatagaaagtacattaaagtgcagtataaaatataaacattttggtttctttaaaaaaagtattgcctttttagttgagtaaaaagtttactgactcttccttataaagagtcttgttacaatatgaagctggagctcatagctgctttggttctctccacagcatagcataatcagcatccacagtataaaaagtccttgtagtgagttttctctacagaggtttgaaaatgatctggcactagaatccagagcccgtctgagccttttagaagcagacattagttgatggcttctggagtatggtttctttctttaaatctgtcttcccttgttttacagtaggactaaacaattataaaatagctgaatacttgtttaaagatagtcactgtaaaatagactcttcagagagagctatcagaggaggatttgcagttgagaagatgggtcggttatggtactgaatttaagaaaagtgggcgttctagtcaaggagtcgggaatggtgtgagaggttaggttactatgaggaaacagccaggggggggggaccgcgcgggcactgtataagtcagccagttcctagcccattggtaagtttttttaacattggtctaggttagaactatactctgaaagccacgtggtttgtgtatttctagctttaactatgtgaacaccatggacagagctggaggaggaacacagaagtctaactaacttcatagtttagcacatgagtgtgtgtggcatactgagtgatggtccataaataatgggcttaaaaatgagctatcaacccattaatgaatgcaaaatatagatactggtgggatagatattggttctttttctttttttttttgtttttttttgtttttttgttttttcgagacagggtttctctgtgtagtcctggctgtcctggaactcactttgtagaccaggctggcctcgaactgacaaatccgcctgcctctgcctcccaagtgctgggattaaaggtgtgcgccaataccgcctggcgatagatattgttataagagaataattcttttttcttttgaagatttattttatatatgagtgcactattgcagacacactaaaagaaggcaccagattccattacaaccattacaaccacatggttgtgagcaatcctttggttgctgggaattgaactcaggacctgtaggtgaacagtcagtgctcttaactgctgaatcccaagtgactaattctttaagaatatacccctgtgtgtatgtatgtgtttaaagcaaccaatgtacactataaatattactgttaaaagattatagttaaaaatcttccaagcatcatcatactttttaattctttaaaatctttactgaagataaggttttcattataaggccacgatgtattgctttgtagttgtaatttattattaaagtgtgtaacatacagatttggtgcattttcttgcagttagcttctggaatttataattttgcctgttctctgtggaaccatcatacagacacatttctgcagcacgtttcttctggcaatgaagctgcggttctgagttcactagagcgaacactgctatcgttaaaaggtactgttgaacttgatctgctcacctttgaaatatcatgcccagcacagttcccaagtagctgctctggacagatatctttctcagttgtacttgagaagatggttgcatttctctgtatgacaagaactagagttctttttgtttggtaagaaatgtcacaatatcaaggccttttcagtggaagagttatgtcactgtggtttcaggcctgccaccatgcttcttccgtgtgcctctactttgctgtacatttctccttctgggccccactgtcaccattgtcctgttaatgctccagtcctgcgtgcttagttgagtggggtctttcacgtttatgcctcaggcagggcaagccctgttttagggggcggctgtagggatgctactttggcccatgctttcctatagtgtgcttgtaagcattcttgtagcatcatttccatctcaccttctgcgaaccaagttactggccttactgagtaactaaggccactccttctgcccactcatttgtctggttatcatcaccccacgcagtcctcttcctaaccctgatctactcagcgctataccttagaatctcaccatgctctctagaaacaatcctagtgcatcacttacatgaactgactagactgtgtatgcacaacccctaaactgtgagcccaactgggtgagatctgtgaacaaaagtgtgagtggctttaaagaactgcccacatttgagttgtagacaattacattttgagctttttttaaaaaacacaagcaggcccggaactcagtagataggaagaccaggctgttcttgaactcacagagatctgatttcctctgcttcctgagttctggcataaagatgtacactgccacactcagcctaaattgaattttagtatatggtctttggcctcatgaacattatctagcagataattctgtagtaatatagatagcaatgcttacttaataaagtgactttaaattttatattcagctgggatgaggcccaaccttagtgtgttgcctggtgttcaagagaccctaggttctaccctctcctcccagattgttttatgctatcatcctcgctgtggagttgtgctgttttagatgtatgatactattgaatcctttagtaactatgcagtcagatagtaaccacatttcccactaggaaagtggatatagaaaaactgccctaagcaatacagttataagtaccagagaaaggatttaaatctagccctgactcaaaaaactatgaccttaattgtcattgtacactaggttttagctaccataagatgtgtttactatcgagcattctcatctactccagatatgtacagaatttagttttccattggttttaggagagacactgtttacatagcctaaagttgaagctttgagttgtatcttacagtttctaagaatgaattaccctcaatttcaaaataagtcgtcctaacagttatgcatctagtgtagctacatgaacaagcattgctcattttgttcagaagaactaggctttgtatttacccaaattgactgggtggcctgtctttatctactaactgaggagacaagtgtcttttaatcttgtctgagttttgttactcacattcattttaattatgattgtaatagaataaaatatgaaaaagtatgcttcaaatgaacctttttgcttttcagtgctgcggaagttaactgtgaatggatttgtggaacctcataagaatatggaggtgatggtaagaaatagaaaggacttctgacaactgaccttgggaagggttaggggtttttctgattggtttacttttatttgccattgatttggagcagtgttagttgagtggccatgtaggtttttttgtactttttgtatgttatagtgaattttatagttgttagcttccaccaggtcacacttctgagaaaggagatgaagttagagaaaaagttagggcctaggatatttttcaattataggtacactgactgttaatttcaatttaagttgaactcctacgaattcgaatgctttaacaatattaataggtacattctaaacatcagttaagtctttgatattttaaaagtgagatatttctcttcatatcagtaatatatgatgtttatacaaggtttgatgaataagtacatgaactgtagatgtagttaatataaggtgcttgtatctacaggggccctgtgttagattcctaccactacaaagtgaggcagaggaggtcactgggaatggcagatgtcttgaaatgtcagatctgggtcccagtgacacaccttttccaacaagagtacacctcctagtctttcacacatagttccagtaactgggaaccaagtatttaaacatagaagccttgggaccattcttattcaagccagcagagtccacaaacaaactgtgtgtgtaaacaatcttatgcaagaccatacaggtttttttgtcttagttactgttctattgctgtgaagagaccataatcaaggcagcttataaagagaacatttaattggagccttgtttacgggatcagaagggcagtccatgatcattgcagcaagaaacatgcatgcaggcaggcatggcgccagagtagcagtagcggagagcttacatcttgactggttggcagcagttgagggaggggtgcctgggcctggcatggccttttaaaacctctagcccacgcccattggcacactcctcgtacctcctgattcaaacagttccaccaccttggaacccaacactgaagccattttcattcagactaccaaagttgtagtatatattactgttgatatacagccatctatttttttttctgtgcagaagtatatagctatgcaatttctacttaaatacaaattggttttcatgatgagtttacacgttctatggggattgtgttttgctggctgcacagaatcaagggaagtagtgtgttgagttgggccttagggtctcctaaaacacactgaagaggttagctcttagattcttgttgtagatttgtttatgataaggagttgttgctcagcatgatacacacctgtaatatcaatttcttgttatgttctgactggaagactgcaaatttgaggcccgattggataacttagcaagaccatatctcaaaatagaaagggatggaagtgtaacttagagctatggcacttgttagcatgtgtattcatgatccttctccttcattttctaccatggtgggcttctaggcatgtatgaccacatctagctctctcagatacttctataaaacctgtctgctagatgctttagtacccttgatgaaaatcacaaggttatgcttataacagcatatagagacattttaaaatatgttcttttctagggttttttacatggaatatttgaacgtctaaaacagtttctggagtgcagtaagtgtttccattgcagttttgactgtagagctacattcattactatttatccattttaattaatagctctgattaatgagggctaatagattagtgaattacttccaacttatcaatagtttctactctgtaggtgtaaatcttgtacagtgatttgtctcagtatcacttttgaacagtctgagtgagggcttggtaggtggcagatcctgtatgtgactagaattagtatcgtcagatttggtaagtaactactgagcctgtatcagaagcttagttttgcctgcagagccctgtcttatcctgagtccagagaaacctttcctaaatgctgcattgtgtgcgcattcttctgtctacttaatattgctaccctaggcaccatcatttcaagacagaataaataaatactatgtgttaagtgctacttagatttttatagattatctctcttagtatgggttatatatcactcggatattaatttcccaaaattataccttatgtaattgtttgtatcctatgtcccacaaaggaaatatgttggggttctacttttattggtgacttgttatcctgtcccttccatatatgtgattgtgatgtgcacacacacacacacacacacacacacacacacactgacttgaatgtgattgaatagctgagttcccagagcacacacatgcacgtgcacatgcacacacacagtgagtatattaaaatacttgctgtctgaatctaaatctcatttgtagaggttgttgattactttatacatgtttttagttcagcaaatacttaatggaacatgttgttaggcattttcttgtattgtagttaatttttaaaaacaggttgctttgctctggtcatcaccaagagggtagtagaagttagatgaatgagataaatgtcaaggcagaatgaggggaaaggaattgacggacagctgtgttgaatatacaaaattaagtagatgagttttttagaaatttacaggtttattgtaaagtgacaaaactatgaagaacacattgtcctttgcctgctttgaactgaaaatgcttcagatacagctgatttagtttttaaaaatgccttataatttgttgctaaaattgttaccattttatttaaaatgttaagtttaaattttggaattagttttgttcattgtaattttgattacaattctgttttattaggaacaaatcttgctatttcaaccatgaatttcttatgtgaaatatcttatttttaataaaattttgatgtgttttgtgaatttacagactactaaaaacttaaattttattcttaataggcagaagtataggtacagataatgtgtgtcgagatagactggaaaagaccatcattctttttactaaagtggtaagctttctcttttagttatgtttgtttacccaagtataatacaccctcacaattagaaaggagatatatttgtaatattttttgctttaatgaaaggaaaattaggtttgtggaaaactgaaaatagcttttgtatctttaaactatgtatagtaattaaatttacatacccaatgtcatagttgacatcctagcacgcacaagcgtttggttatgttatcagcactgggcaaaggaaatcacccaaaatgagtattagaaaaattgagtcttctaaagttcattattcttagatttatcagagaaaagcaggaaaaaaggaaaatagcagttcagccagaagcggatgagacgcagctggcagcagctatactattacaacgtgtattcacagtgacttcagattatcatcacaactaccacaccttttgagtagaatttatggttttactgtactaggcaatgcatataaatgctagagctaagttttctataatattttgtgaaagttgatgtttggagaatagtaagaaataaaaagaactgtgtggtgccacttgggaaggcctgattagagactgcatgcacaaaatgggtacttaaaagtggtcagagtatcttgttccttttactgatgccttagtagtagggttagactttaaggccagttgtcttcatttctcacattctagatagcatcagccatcaaaaccaaatcactttcacctttaaaagccctatacaaagctgactttatttatttatctgtttatatttattttgagacagggtctctgtgtagctctggtaatcctagaacttactatgtagaagacccagttggcctcacctcacagagatccgcttgcctctgcctcccaagtgcagggattcaatgtgtgtctccacgcccagcctgatttagattcttcacatagagaaactaagaggatgatgacattaagtcaggagggcagtggatggcactgacacttgcgtgcctttctgttagtgtagttcctgctggctgtcagagagttgctgaggggcatttccttttttataaaggattctagcaggtaatgtaagaggagtaatgtaatgtcatcattgtgtaaccctgaaggacgtatcaggcccaggcagtggtcatcaagagtaggaaggctgctgaagagatttgggtacacactcatcagatggtctcgcacatagagagccagtattatgcacacagtctgttttaaatagtttttaaaatgtttatttaatatgagtgctctgctgcatgtacaactgcaggccagcagagggcatcagatccccttagatggctgtgagccaccatgtggggtgctgggagttgaagtcaggacttttgtaagaaatagccagtgctcttaactgctgagccttcccacatagtctgttttagaaaccacatttattagtagcctattgagtttcttatttcttttagctctgtaattctactttttagaacatgtttacagcagcaactttacttagaaaatttatattcataatttcccatttttttctaaagcttcaaaaattgggacatttaaaacattgacttaaatgggattgaatagctgagtcctctgagttcccagaaagttaccgctcacctgtcagtacatagtcagccccccaccccccttttttttgaggcagggtcttactcgtggctgacccggtacttatggtactcaccttgttgtccaggctcaccttgaactcttgcttgtgcctcgactgagatgtaagacttgcttttctgtctctgctcttttatgctcatgctgcttctcctgacctttgctgattatctcaaagcaaaccatccatccacccagaacacagagttccacgtagcctgttatggcctcagacttgatgtttgtctagggaggatcttgaacccctgacccttgtgcctctgcttcccaagagctgggatcacagtgcggaccccagccctgaggacttctcccccttgctgcttgcttgctgagataacagttactttcatgaagcatcttgcttgtttgttttttaaattacatttatttatttgaggtaggggacgggtcacgtgtggagatcagtagacaattaacagaagttggttctctcctgtgcagatctagtgtaggtttggcagccagcacctttccttgctgagccccccgaagcagttgtattatttaacgtgttctttctccacattcttcttccctgtatttcttacacatttgtagtgagatagagacttgatcacgttcagtcatttgtcccaggacaggagggtctatggtaaggcgacttcctgtgtgtcaggtactacctcatctcaggaggacggcctccggctgtgtgcgtgcacggttgggttaatggataagctcttacagcttatctcaggcagccttcttgcctccctgggggcagctgctggtgaccgctgtctagatacactgttccccagaacttacatggtaatagcattctaattcttctgcttcttttgcattccttagctacagtgctctgtaaataggacatttctcttagcagctatttgatatatcaaaatatggttcataggaaaggcagtcttggttttttaatgacctcctctcattattgttcctttttgaaaagctagcatatatttaatatttatatattaatatatttatagattttatatcatatttacttgttaccaagttaactatgatgggatctttttagtccctgcattagaaatactagaaaattctgaggctggcttagcagttaagggctcctctaagggatccaagttcaattcccagcacctgcatggcaactcacagctgtctgtaatcacaatttcagggtgcctgtcccaccaggcatatgtgcgtgcaggcaaaatacccataaaataaaataaataagtctttagaaaaatgaatactagaaaattttttatgaggtatagcttgggaaaaatctatgattttccaagaagattgcagtgtatgaggaactggtgatgcctagaggtcccaggaagtttacatctggttaaacgtttattaataaacttacaattgcaataatgagttctatagattttgtacaaaataccattcaagtttttttctttatagctcttggacttcttggatcaacaccccatttcatttactcctctaattcagaggtcactggaattttctgtaagctatgtttttactgaagttggtgaaggcgttacatttgagcgattcattgtccagtgcatgaatcttattaagatgattgtcaaaaattatgcttataagccatccaaaaattttgaaggtaatactccactgaattttaaaattttaatccaagtgtgatgtaattactgttttgatataattttcttgaagttcattttagtctgaaaagcaaactcactggtatgtggaatgagaaatagtttacagtttaatgtgtgaatactggcttttaaagggctaaatcttttatatttactgagctgtcttgtagcgtagtcaatgatttgagttacacagtttaagaattatagcccacagtagcttctacagctcctgttgtacttactattatttaaagaataaacgttgtctctgatttcttattaaggcgagttgtagaaaaggctgaattgtacgctgcgttgtttggaatgctttcttacttaggtgtcaagagcagtgaggaagtcttacggtgtgaagggaggagaagggaaggaagagacagttgggaaggacagcagtgtgtataagctctagtgcttagggtggagctgaactgatggacaacagcaagggaagggtgcctgtaaattgtgttcataataagtatggagagagtcttttgcaagtatgtcttttcttctgaaagcatattcttcatttcagttacaggatgcatctcagggagaatgtctgtactgttaactggggaattttatttttctagatagcagccctgaaacacttgaagcccataagattaagatggcattcttcacatatcccacgttgacagagatatgtcgacgattagtctctcattattttttattaacggaagaagaactgaccatgtgggaggaagatccagaaggctttagtaaggaagagtttttcagttttcatatgacttgtctctctctttcataaacaggatgtgtttgaatgatagggacacaacactgtatgtttgatgtagcatttctgaccccctcctccatcctccccccactctgtctctgtctctgaggcaggtgtcactgtgtagccctggctgtcctgacactcaccatgtagaccaggctggccttgaatcacagagatcctcctgcctctggtccccaggtgcctgtgctactgcacacagctctgcccttggctttttacgtttcagtttggagcttcagggctgcagttggttggttggtatgttgctgtgcacttaactccccctcttacccttttgaacagtgagaagtaggactaggttactaattcagatgtgttacatagtttttttctagaaagatccttttaagctgtatagctgtctttacctgggtgtggttgcactcacctttagttccaagattttggaggcaaaggcagtttggatctctgattttgaagctagactggtctacagttgtgagttctaggatagctaaggctacactaagaaactctgtttcaaaaaacaaaagcaaagcaaaacaaaacaaaaggaaaaaaaaaaagaaaagaaaaaactagctgtccttatgtagtttagaatgaaaacaaaattattaactacttatctcttaccaggtccttatctagtttgtggctatatgtttgtatattaacttttatgtgaaagcataggtactttggattgaacccagggtctcacaaatactaagcatgtcttctaccccaagaccatgtttttaaattaaattttatttattagtgtacatgtgtacacatgcctgcacaattagaggttctttgcttctacactgttggattcagggatagatctctgttctcaggcttgctgataagcaccattagcctcggaaccatcttgtatggccctgagacactttgtaaactgttacagtttacaattttcctttgtctccatgttccttaacagttctgaattttgtaattgacagatggctagtataagtttgccaaaaaccttgttacagaaaagaaaattgtgtctaataaaacatttgtgcagggctgaagagagggctcactgagtaaagtgttcaccattgggagtatggggaccagaacttggatccctaggagtcaactaaaagccacatgggcatagtggcccacctgtagtcccaagatccaggatgcaaagacagagaattaggttctagtgcaaacttgttaagtagactatatatgggagacagacgttaaagaaagtaactgatatcaagcaaccttgggcctccacacgtgttgcatttgtatgcacttatgtacccttcctcaaatgagcacacataacactcacagttgcatgcatatccacttggctgcatcaagacataggcaattttagcctttctaccactttggcttagacagccatatatggttatacatgttgcttcaatattttaagatgtctttaaacttttgaggacatttgtcctcttggtttttatttgggaggtattttaagctatttagaaaatggaaattacattatacagtgcatctttttttcctaagtagactcttgctcttaaaaaatgtagtagatagaatttcatagtgtatgacgaactttgaacattaaatccttagggcttgtctgtctgtttgttttttttttttgggggggggttagttctaaaagattttacttggactttgaatatacagagaaaatttatgggaagtatgacaagttttaacttgagaatcattactacatgcattaaaatgattcccaagtggtaattttctgtatgtaatctggaaatacagcaagtttgagctttcatccactacttcccttcccgccgcccccctcccccccccaacacacacacacaaactttttttcaggatggcaagagtgctgataaggaagttaatgggcagttcatagagattgtaacgtatacatgtgatttgtagctggaggaaaggaatctatgtaacccgttctattctcagggtgtacattcagggttaggtctcagacagtccacacacatggtatgctttgcaagcatcactgtgttgtctctgcagagcatcatttgtcattttttgattgcagcagtggaagaaacaggaggagactcttggaaatacagtttgagggtgagtatcagtgggaagagatgccgacagggaggcactccagtgggagcgaagagcctcgcttagcgttaactgcttataattacaacagtattctagagaaagttaattaacttatggactttagtctgagtttttctttttattaagatggggatagtagacttattgttttggttcatcaacttgttttcgaaataattatcattgtacaaatagaaaatatttaaatgaaatatgtcacttttgcacttgaatgattttcttgatgaagttttttgatactttactgttttgcatgcttgttttggcttttcgagacagggattctctgcatagctttggctgtcctggaactcattctatagacctagctgtccttgaatttacagagatctgcctctgtctcccaagggctgggatcaaaggtgtgcccaccagtgcccagcttgataccttacttttaaataaagtatttattgtctcacagttttatgtactaatatagtagtaggctctattactcttatcgcttagtatgagtctcaaacattagcctattgctttcagttataggatacttttaaaacatttattgataaggtaaaaatactgactttcagaatatttgtaaaatgagcttattgagctgtgtttgttaatacttttgtacataatttgctaaaaactgtgtgtgttgtgttttgggggaggttgcagtagaacgactggggttcacaatgtagaacaggctagccttgaacttgaagagttatgcctgttcttccctcccaagtgctaggaatgaagacatgtgccaccacatacatggctgattttgtttgtttgttcttgttcttattttcaatatcttgtttgttcagagacggggtctcattatatagtccttgctggtctggaactcagcatgtggaccaggctgcctttgatcagagagcttgccaaccctgcctcccaggtgctggcctgcttgattgactgacagagtttctatgtgcagctgtggctgtcctggaatttactctgttgaccatgcagaccctgaacttgtagggattccacttgcctctgcctcccaagtgctgggactgaaggtctacacaattactgcctggctatgatttatttttattttaaattgtgtgtgtgtctgttcagaagagggtgttggatcccatgtgttgttatgtccagaagatggtattgggtcctctgggggctagaaacattggcagttatgacttttaaaacaaatttaagaaaatgtgtatgtacgttttgcctgcatgtgtttggtacatttcatgtgtgcctggtatcaaggaggccagaaggtgttgctggatctcctgggcctggtgtcacagagggttgttacctcccttcgaggcctttagaaaagcaggcagtgctcttaacctctgcaccatctctcaggcccaggcctccgtgctctttgttgttctttctgctgttgacttatttactgctttcacagctttattttactagcagttcatttactcttcttatttattttttaaagatttattgattttatgtatgagtgttttgcctgcattgtatgtgtactgtatgtgcgtagtgtccagtagttttatgggtattggattctcaggaaccggagtgacagttggttctgagctaccatgaacttaggtcttccacaagagcaacaagtacctttaatcactgagctatctctgcagctcatgcctcaatgcttttaagaatgtagataaggctggacaggtggctcagcaactaggagcacttgttcctcttgtagaggacctggttcagttcccagtatctccacaaggactcaaaaccatccttaactccagttctagccagtgcctttttgctccatgaatgccagacataaggttcatttacctacacacaggcaaacatatacacataaaataaagataaataaatatttttaaaaccaaataacatattctttatgtagctaaataggtcttgttgctgtttatgtttcttaaaagaaatgttatttttcatggtgaattgaatttatgaactgcagtggatagtcatgtctgtgaaaacacattattaaatatatcacctctgtccttagatactcagtcattttacttacatttaaatgagtatggctactttaaagtacagcaaattaaagatactttgagtatctaatactaaatgatcacaaaaatgaaaagcaggttttgttgtgaattaacatccttcattcctttgtaattaaaaaaaaaaaactttgctagggctagaagccaggcttcacgtgtgtcctgcactgagccccagccccagccccagccccagtcccagccccagccccagccccagccccagccccagccacagccacagccacagccacagccacagccctagccacagtagctctgttttgtaggaaactaacagttggtaatatttgatttagaatttgaagactgaatgtttctttgcttcattgtaatagccaatgtaatgtgacattcttctttttactaggagtttgttctttttctccccttctagccttgcactgaagtattatttatagatatattccacgaatataatcaaactcttactcctgtacttctagaaatgatgcaaactcttgaaggtaagttgtagtttgtgatagttttgtcatttactattcagttaaaatagcctaagtgccctaatcctggtcatacactgaatgtgaatctgagaaagatggactgtgttctttcctgcaaggatggcattggaagtcagctttgaatatgatacttcttttgttgtaaacataatagctccagagccacgtgacaggtgcagtagcacttggggggatttctctagagagtgcttgctgtacgaagtggttagagaagctcagatgatttgttagccgtatagagcagtaagatagaaaggacagagatggaaaagaacatgacaaagcaaatttagatatttgatcattgtactttatacacaatagtcgtttgctaaataacttcgattcgaaggtcagtttcaggatgcattggacagactgacttaattcattcttcaccctagtgcctggtgtgcttcattattgtttgttgattgccttgagcaactaattgaactgggaacagagaactaatcaagagtatccctaaactttacgtcttaatgacaggaaaatcattgcttcatatatagtggttgtggagtacttttaaattaaaaaaaaaaaaaaaggcttcagagagaaacgagcttcaaggacaggaggaggggagaggtccctcagacaagccagctgcgactactccctggcatggaggagtatgggagtacgtcctggagaagaacctagtcatagaagcagctgaaatgcttagaaggcagagggcagtacagagactagattacccaccagttgggtcaagacttgggtaggtggagctgtaaggaaaactgaacctcagcgtctcttggggactgttatcctttcttgttctctctgccaaggggaacaataagctgtccatttagtgtggtatctttaaaggtctgtccggcttcaggtctgcctcgctgctggggtgcctgaagcactaagaggaggcaaaacagttcacaatagaggtcccagttcatgattccctggtgaaaaacagaggagtctgagctgtggttccaggcctcctgtgtccccagattctgctggggaccgcagggaggtgggaacagtctgaggatccgcacttctcctcagggtgtctttgtgccaggcaggaaagggatggctaagcctgggacaggtggaatgcagtttggttctgagtgaaaatgccttctctaggagatgtgggtgcagctcttcccaaggaaggccttcctcccctgtgatccttgatgaaggagacacttcctgcttgtccagtcgggtgtgaatgcatacaccttacttggggtgacctagagattaaatcccttttttcagaaaggactgcccaggaagggaggttcactgactaaacactcagggcctgtctgcattcctcagtagcgtggagaactccaggtttttgtgctactgtgaccgatcgtcattgtcgtggttatgtgttccagatcagggagttgggaaaggatctggccccacacacgcctggccttctcagtcctgagactccccaggttttgggcctgttcaacctgccagttctgtctggtggcaccaccccttgcgtctcaaggttatttgagctttgtttgttttcaggagatttactcacagtagacagttataggtttctttctggcagttacagattgctaaactacataatgcttatactacttaggttttgttttttttttgttttttgtttttttttttttttttaaagatttatttatttattatatgtaagtacactgtagctgtcttcagacactccagaagaggacgccagatcttgttagggatggttgtgagccaccatgtggttgctgggaattgaactcaggaccttcagaagaacagtcgggtgctcttatctgttgagccatctcaccagccccttaggttttgtttttgtacaattctcactctagtctcggcttaactttttaactcctatagaaacaagacaaggtgtgttggttggttttatgtctacttgacacagctagagtgatttagaaagagggaacctcaactgggagaatatgcccagcggactgacctgtgggcaagcctgtggtaaattttctggattgttgattgctgtgggtgggcccagctccctgagcaccgccacacttgtgcttgtggtgagtaagcagactgagtgggcagcactcctccgtgctcctgtccagcaggctcctgctttcatttcccatactgacttcctttcggtcatggtgtgttagtatagcaatagaagcccctactaagacaacaggctatttaggttccattcccattgattgccagctgctgttaagttttcagtgacttcctagttgagtttgctttctggttctggatcagtttgcttctttgagattggatctggcttattcgtacattaagcttagcagttcctatttatgagggacagagactttgaggaaagcagtaagcttttctctttgggagatacataggtaaattgtcttgtccaactgtagggccctctttactttgagatagctcataaaccattaagcatttgaggtgctgggtatattaactagcttgatttacttactctacattgcttgaatgtataatctctttttataactcataaacttatataaattatacatttaaaatacagggtaacaatactgtttttaaaagttgtttttccccaaaagacaagcactacatgatcttatttatatgaaataagaaaaggttaatttcagaagttgagaggagagtggtagcttcagaggctgtgtgcaagggggggggcagaatgtggtaagtggggaagttcttgtgtgccactgtacaataaggtaactattgaacaatagcatttatatttcagaaacttagggtttgaatgttatgtttaacttgcttcaaatattacacagtatatgaatgtaccaagcttacatgttcatgtataagttttaccagttaaaattaacttcgttttctttctttctttctttttcttcctttctattctaggtccaaccaatgtagaagatatgaatgcactgttaatcaaagatgctggtatgttggacttcagtgatttagaaatgtgtatttacccaatagatagagggtctgttttgtgctgtgagaattgggatgtaaaggtagctaagattaagaattgtcagttaaaggaggtcaaccatgcacgcagctaattcatgctaaagcaggggcgacaaagaagggagttatggatagggcaagtttccttcttaaacactgtgacatcagaatgcaaggatgagcaggtgcaggcacagctccgagcagctaaaggattgctgtgcaagatgaactagagaaaaatagactgatgataaagcatggctgccattcacatctgatactacttataatatttgaaatttgactcatattagattggatttagtatactgtttaaaaatactgaagagtacttgggacaaactgggaataaaacaagttaatcagtgtctccaaaatgtatttagtaacttttgtgttaatattgtctattttcctgaatttatttcatgttttaaagtaccttcagatttttatataaaggcagttttctaaagtttaatttcattctttttttttcttctcagtgtataatgctgtgggattagctgcttttgagctgtttgacagtgttgattttgatcagtggtttaaaacccaacttcttcccgaattacaagtttctcataataggcaagtaaaaccttgtgtatattatatattatataccactttactttcttaattttgaaataaaaaacccaacaactttaatatgattttggttatgtttagcatggcaaagaaaaaaacttacaaatttataactgaaatataagcaaaataattctttttttttttttttatgctactttaccttaagtgtaaatcctgaaagaggtatttgatgtgatatgaaacagcttgtaggtggcaagaagcagcacttatgtagaggtaacggagttctctgtgtccctggaagaagctgtgcccaacataagactgctgctagcaactagctccagtgccacaggcagcccagccagagtgaccgctgtgagaggggctgttccagggcagccacacagttggtctttgagagaacacagaggaggagatagagctacctggccattcagtgggtaaacatttctgcagaggcacctaattcatgattaccagagctatgtggcacctagaagcactttggctcaattcttgtacttgggactgtgttttttaatttaccgtggatcgaaggcctttcatggtttttataagtaatttctcatttcaagattagagactggagagttgggagcgggctgtggttaagcgcacttgctgctcttgcagatgactcctggcacccgtatctaaatggctcacagggcctgtaacttcagctgcaagggaagtaactgtctctggccttcacacacactccactccacaccacgtgtcctgtgtgtgtgtgcacgcaactacaacctttaaaattataataaaattagagattataaaaaaacatattacaagaggctttttttggggtgtgtgtgtgtgtgtgagtgtgtgtgtgagagtgtgtgtgaaggataaaattgagcaacttctgtgtatctcctgtcctgtagtcagcatagcctgtagccgtagattagtaaatatttgttgactacattattgaataagtagaagactgtctgtgtatatagatgattttacacatatttagagtcattgaactagagatctgtgtcctagcactcaagaagcccaggcaggaagaccttgagtttgaggtcccccagagcagcacagtgaaaccaggtcttagtcctcttcccccagagcacagaccagcaaaggtgaaaacctggctgctttaaaagtttgggccagttgagtactaacttgtggcttctctattcaatcatggattcaattaccaaatgtttttaatacttagaattttccatgccctctctaggcccatacacatacatatttgcatgtgaatgaaatagcctctgacagtactcacaggaagctaggagagcctttgaaggggtaaaaacatacttactggagagaccaatgtgagatcccatcagccctgacttgtgcctcactgccttgtgtcacactaccttatatgccatacttagtgttgttgaggaaatgagtttcaaatcatttccatttaaagcctgagatatggaaaatgtgctctgagtccatgttgaagtgataacattttgcgtatgtttggataaatcaaaatattaaaatataagtaccttttataaatgaagatattaaattttttaagtgaaatatatggcttgcttcatgttttctgttagattactgttctagaaactttgtttctcaaagtttaatgtgagttgtttggctcacatggtaggttgtcctgttaaatgcaagtcctggtctagtaagggtgacacatagacagtgtcctcacaggctgtgtgtgctgctaccagtttaggggctgtccttcaaggcctggttactgtaagcctgagtaggctgggtgtgactgactgtcatctggggaattcctgagttttgttttctttatttagagtggaaccaaaaacatggaaatctctgtgggttttggtctaaaagctgatagcttacgccatgcatgggatgttatttttgcttctatgattgttcagataactcctatcccttgaaatggcatttctccactttacatttaagtgctagtctccagaaggctgttgtcataaatctgcataccggtagtttattgtattttaattgttttgctggactgtggactttgaggccaaaggtagttacatatatatttttgaattttagcatttgtttttctgtttgctccattgtctttaagatgtgacactctaaaataactgtatactcttcaggctgttccatttatacacagaaataagtttcatttcgtctctaaaagtttatggaattctaggacaaaagtgttttaaatttgagtttgtgatttttctttttgcctaaggaatgtcttggttaacttcattttagaaaaaccatatcaggagaaataaattatgtatttgttactgctaatgctttgcaattttaatgatgtaagtcatgtttgtgagtctcatttggtaattcatacctcttttcgaatccatttagctagaatcagcacgcttatgcaaatattacttaggtaaacataaagaccttttttatagaaaataatatttaaggattaacagatggatatagaaacattgactatataggaggttattttatttaggatttatgatgttagcactgttggtgcttacctatctttctgtgctgcacctcgctcctgcggggctcctgagcatcttcctcaggttgagacacgggcttcaccacagatcttaaccctagccttacatttgactcgggctgtctgcagcctccttgctcaggcagcccttaccctcaccatgttagtgttctggctgccggcccggtcacggcctgccacagttaggcatgcagaaggatcagagcaccatgtatggagcaccatgtatggagcaccatgtatggagcacctgaggactttgattcacgtagatcaggacgccattgtttcttctgtgttgatgtttagaagttgattttttatttagatttaaatggaaattatactaagtgaagtagacctcttaaagtactgaacattttaatttactcatgtttccctcttccacttaggtataagccattacgacgaagggtgatttggctcattggtcagtggatttctgtgaaattcaagtctgacttgagacccatgctgtatgaagcaatctgtaacttgcttcaagatcaggatttagtggtatgtcagcctgctgcattagcatgtgtagacctcagaaccgcctctaaaatgctcacaattcttccttttatgaaaagggctctagggaatgtgctagttacaattacaggtgtgggaagcgtaacactcagccaggggatgtgttctcagccaggaaagaaaggcttacatgctgttttaaagacttgaaggcagcatttgtcatcttacttggtttggggactaaaagtatgctaactggtgcccgctgggagatgatggtcttatgtatacctacgtgacatgctgtgtacaataaaatatgagtcccagactctgaagtttgtgtgaagctcagatcatttgggagtttggaaactgccctacctgaggttagagtaggtgtgcagcttggacagagcctcctcctccctctgccttcaccctttgtcaggagccatcctaggagaagctaagaactagccagtgaacttcctgagacgagcccagctccagtaggcaaggctcaggagagatccattttaggaaagattcctgctgttgatatgcttttcctgttattattaaacatatataacaatcactaggtattagctcacccttttcagcagatctctgcagacctgtgaagatatactgtgttctagtgatgctatatagacaaatagataataatctatagaattcctgatttgattcacataattttaggaagaaaggttcagagatagacttagatgctagaaagatgttatagagttagagtcaagaatagcatgtacccactcctcagaatagtaagtaaaggctgtatactaagaattagaatgaccttcataattacactattttaatgaagagaaatggacttgggacaaatttgtgttaaaggaaaaacattgaggtccaaggataaagtcacagatgtgcactatgataagtcaaggccatcataaaactgttactttgaacttttaatgagtatattataatgaaacactgctttaaacttactatcaacatcctctgtaactcccattttatgtaacagtttatgtctgaggtaattttctaaataactttttgtctaaaaaggtataaaaagaccagaaaaaagaaataaagttgttggttgaatggtttggcttggggagctttaccccatccatccatccgtctgtccgtccatccacccacccatccacccacccatccacccacccattcatccacccacccatttcatccacccacccacccacccacccacnnnnnnnnnnnnnnnnnnnncccaccccacccacccacccacctgcccgtccgtccgtccgtccatccatccatccatccatccatccgtccatccaaatgtgtctgtctgtctgtctatatgtttatgtgtagggtatgtgtgtaagtatgcttgaacactgtggaattgattgtgatagatggtcgggctggccagagtgtgggtgtatgaatgattgaatatatatgcgtctatgcgtatttgcctgtacaaagcatcttaatttttttctttccctttagtctagttcacaaagagttaaccagataaactagagaggcttctgactgattccagagaaaggaaccctagcagtaaatcctttaacttcattccctgctgctaaatatctgttgtttgccagatattagcgcttatcaaaacacaagtgacagagttaagaaagagttaagtttttttgtgcttaatgaagcacagaacagtaagaaagagttaagtaaaaataaaggggtggggggagggctgatgagatggctcagcgggtaagagcactgactgctcttccaaaggtcctgagttcaaatcccagcaaccacatggtggctcacaaccacctgtaatgagatctgactccctcttctggtgtgtctgaaaacagctacagtgtacttatgtataataatcaatataagctttaaaaaacaaaagaaagagttaagtttccctagtgctatttaagcataaagagttaaacagagcacacagagttataatgtttaataaagcagagagttaaagagaaaagaagccagcatttttaaaccatagaataagcagggaacttttagaatctttgagatgttaccagcaagcattcagttagagagctagaaggccagagaccatcagtctttaaatctagtctagagactgtcagtctttaaggccatgttcgacgctgtgtcccacttcaagcccattccaggctgtgcaggcgccccgccacccttcatttccagctcaccaacttctttgttttcatgtgtctttattttcttgtttcgctggtgtctcctgcatgctactttcttttggtcccaggctttccacttacctagtggcaattagttttcttcctggaaatatttattgctgcaaagggtttttaagcagttatggaaaacttagacagatcagggataacgatacttgttcttttgtaacttgttacaaactaagggtaacatcctttcacatgacatatgccttatgacttaatcttaacaaaaacaggaaagaaaatggtttggaataatttttctgtcattaagtattaatgatgctcagtagttctaagaatgattaaaaacttatactgtactttgattgttttttttaggtccgaattgaaacagcaacaactctgaagttaaatatccttcaattttttttctatttgcaagtttttttttcattttttaaaaattttaatttgttgttttatttattttatgttatgggtgttttgcctacaagtgtgtgccacatatgcgcctgattatttgagtgggcaagaaaagagagagtgtcagatccctggaaatggagtcggttatgcatggtcactgtgagccgcccataggggtcgggaagcaaagccaaacctggaagaacagcactgctcttgtaaccctccctctagccctactgtagctagttaaaactaagataaaacctaaaaacactttttaaaagacttaatcacaaagaagttaaacttctttcatattgttttgaatcagagtgtcgcatagccctgcctggcctggaactctacacacttgagactggccttcaacttctggtcctgcctctgcctctgcctctgccccctggtgtttggatcagagctctgcactgcttcactgggccttaagttcaatatttaaaactggttattttgtgaaattaatttttaggatagttaaaatatatttttacagaacatatgtatttatttcaataatttaatgtatttttatctttataaatttcatgtgttttcaatattccttaactgctttttacctgttgatgattttgaatttaggacagatcagtttttaccggtaagaatactggtttccaggttttgtaacattatgtctttagagtacatatagtggtttgtagctgtaatttatatctgtttttaactttagaactgtacattatttactgtgtgtgtgtgtgtgtgtgtgagagagagagagcatgcttctggcatgtttgtggaggtcagaggagaacttgaggttttgggtttcttgtattagaataacaggtgtccatcacagaattttgtacttacctgcagcatctgataaagactgcatcggttcagtggcctgttgagaacaacagttaatgttcttattgctttagttcatagccttttcgtattatctgcaacaggattttaggaaagtgtagttacagggcacaattggtagccaagttgacaaaagcacaatttggactagtcttttaaacatttcagcttgtgggcaattaagatctaatgtgtatacattagcagtaataaagaaaaaatggtggcattgtatgttggcagcttgttttaagtatagcttaggttttatattgttgtctcattgctttggcctgatttatgtttttatccatagaagtctacatcttgtaacctctgttcgttgttcttcttgcagtatctggaaaccatgttcacactgcttttccagttgctgcagcaggttacagagtgtgatacaaagatgcacgtgctgcacgtcctctcctgtgtgatcgaaagagtcaacgtgcaggtgaggttgtgggacagaaactcggtgtcagatgtgcatttaatgtctttgctttatatggaggaaagataaagtagtcttaaaaggtttttaacatatgtgttagcatttcatttatgtgtttttcagaattgacatttatatttgaatttattaaaagtgactaagagaagccagctgtgttggtgcatgcttgtataacctagcaactgggaagctgaggcaggaggatgattgaaagttcaagtgatagtaagacctcgcctccaaataccaaaggaaaagacttaagaatatttaaatattaaaattatatctatggtgtggaggtatttagaaagtgaaattttccaagttttaaagatcagtcttaaagttcagagtgtttagtgtctaaggaagagccatctttgcaaatttaagttttttaggaatttgttttactctgtatctttttacatatgttcatagactcctttaaagattgattttgtacgtattgcatatgagtgccaggtacgtgagaagacagctggggagtctgttttctccttgcgcctggcatagagagaggcagggtttctgtgtatgcctctgagctgcccttttgagcttcgcgttgattctcaccttagccctcagtttgctaaggaggtgctgtgattgcaggtgctcacaatggcacccagcttctcatttggattcttgggatcagtctcagtcaggcttgctcgacaagtgcttttatcaactcagttatagttttgcgccccccaccccactttttgtttgtttgtttgttttttcgagacaggttttctctgtgtagccctggctgtcctggaactcattctgtagaccaggccggcctcgaactcagaaatccgcctgcctctgcctcccgagtgctgggattaaaggcgtgcaccaccccgcccagccttttttttttttttttttttaagatttatttattttatatatgtgagcacactgtcactgtcttcagacacaccagaagagggcatcagatcccattacagatggttgtgagccaccatgtggttgctgggaattgaacttaggacctctggaagagcaggcagtgctctctaatcactgagccatctctccagccaccctgtccttatttttacttaaaaccaaaccaaacattacatacaaatctcacacacagacacacagacacacgcacgcacacacacacgcacacacacacgcacgcacacacacacacacacacacgcacgcgtgcgaacaaagtatttttgctggcatcatatacatgattaagtataaaagtgatttgtaaagttcgtaaaagttaaattatttagctttcctgtaccccccccccccgccccattccataaaaatgagccatccatgaaacaatagtataattattctctggctttttatgtccagactcaccactttatacattttttaaaagcagagaagtatttctcggaacgacagtgttttagagttcacgcactgatttactcttagatctactttttcatgagttcagacaccttggagttgcttcttaattccagggctattgatgagaatagcaactcatattgagcagtggccacgtacctctcttgtgccaagtgggctgcatgtatttctcatttcatgcttacagatatctttggtgagatgtgaagtaagcaactggtcaaaggttaatacttcgttgtattatttgaggcagagactaatgtagcccaggttggcctcaaacttgcagtgttattcactacatatgtttgaatacctgatctttctgcctcttcctcctaattgtcgggatgacaggtgtatgccactgtacctagataaatattcataatattggttgataatgcaagtgttcaaattaatcattgtgtaattgctatggcaggcactgctttctcaatgtaatatttcttagcactttgggttcttgttacaagaattatattatttcatttgatggtggtttttgaatatttagtttgcttatgtaagtgattaactggagttgctctttaaaactaggaagtctctgaccttgctattcatgttgagtaaggtctttaaactggtgtcatgtataaagtgggaattaaaattttgaactcagcaaatgtacaggatttcatgatatgaaattactacaaatctctaatatagagcattatatattttttaatttattaggtattctcttcatttatatttccaatgctaaaagtcccaaaagtcccccatatcctcccccctgaatattatacatttttagtaatttatttgttaaaaagatggttataagtgcaacatttttccattcatataaatctagctagtgaaaatttcttaaagattttttttcttgtacaaatttattttacatgtgtctcctcaaaatgccattccttttttactccacacagaactccaggtatctgctatacatttaaaaaaataataccaagataagaaatggttaaaaataccagttctttcattcttttttaacttttgtaacctttacataagtgtattactatgttcttgtctatttacccttcaaactaactttcacttgcaaaatttgattttgtctgattataatattttagtgaagtcattacctttgtcatgtaccatagggtacagttacttgaatattaatccttatttttgaaaaacttaattttttcacattttatgtatttgtttctattggtatggatgtttttcatgtctgtctgttcaccatgtactgatgcctgaggagagcagaagagcaggttggatcccctgagacgtatatgtgtgtgcgagggcatgggcgtgcgcacacgcccccgtgtaactgtgtaacgcctgggaatgaaacttgggtcccctgcgagagcaaccagtgtcctaaacagctgagccatccctagactcataacaaacattttagaaaagcgcaattcagtgatttcattcttgaggctctacaagtctctagttggaataaacatgctatcaagttttatgacaagcagtctttgagctttcacatttcttaagaaaaagaagaaaattgaaggtcttcaatggaatatgtgcaaaattttatctaaaagatgaaatatcatttaggattcaatatagtttttaaacttcctaaagaaaggacccttgttaaaaagcatttgttacacttttgcatatagatgtatacatttggggggggtctttaaggttgtattatttattcacctaaaaaacaacacatacactccactgcagcagcaacatatgcctgtgacatattcagtgaatgtgggccttcctctgtaatttatgaactgtctctacagaagggaaacgatgacacataacttcttagtttagtagaatatttgaattcagtttttttattgggtattttatttacttacatatcaagtattatcccctttgctggtttcccctgagaccccctaacccatcttccctccccctgcttctatgaggatgctcccccactcactccctcattctcatctccccgccctggcattcccctacactggggcatggagccttcacaggaccaagtgcctctccttcagtccttagaagggggaacaaaatactcaagggaggaaatacagagacaaagtgtggagcagagaccgaaggaaaggccatccagagactgccccatctggggatccatcccatatgcagccaccaaacccagacactattgtggatgccaacaagtgcttgctgacaggagcctgatatagctgtctcctgagaggctgtgccagtgcctgacagaggcagatgcttacagccatccattgtactgagcacagggtccccagtgtaggagctaggggaaggattgaaggagctaaaggggtttgcaacccataggaagaacaatagtatcagccaaccagactccccagagctcacagggactaaacaactgttgcatgttttctgcccatggtttaacatgaggtggatccttaagtgcgtactaaagtgcatactattgactattcatgccttgtataccaagatgaataatcttgaactcacaccacaccagttggttacttcataaatgcccattttcctgggcctctggcagtcaccattcaactctgtcactaatgtgactatttaaaatattttttggaagtggaatcattcattgtttgtctttctatgtctgatttcattcagcaaacctttaaggttcatctggattgccgaatattacagatttcttcttttacttttaaatgctgagtaatatgctcgataattcttgtgtatcgtgcaggaaactgaagtgtgtggatgcgttagttgtatagcatggcttcacattctcccctgtactactttaagtgctatgagatgatgtaatcagttgccacactgcactgttagggatttaatagctagagtgcatccccacacactctgcagagtttctgcccaaggttggttggacccaaggattcatatactatatatacatataaaatgtatctttaatttagtaaattaatattaagtaatttattgcctaatatttcacagtgcttgccaggtttctcacggtatattgcctttcttactaaacgatcctgttgtctccctttttatctgtcttgtagatccgaccatatgtggggtgtttggtacagtatttgcctcttctctggaagcagagcgaagaacacaacatgctgcgatgcgctattctgacaacacttatccaccttgttcaggtgtgtgagttctccagtttcttaggttgtttgtttgtttttattttttacctcattgttttcatgtgatttaatattcatgaaagtcttcatgctactttcaggcttttcaaatgtataatctgtacactttcaaaaacacctgtcatctatttagtgcatttccaagggtatttgaaaatattctctacttcaaaaggcatttagtgttttccagtggtgttagccccatgacctgtgtgcccacatggattctgtctggtatctagagtgtttcagcatgaacttgctttgcagttttcctggctttaaaaacttttcataacccaagaagccatgagatcaggtaaactgctttgaggaaggggacgatttggccttgagatgtttgtaatttctatagtgtggtgatgtaggtaggtagaggggaacctgaaacttcatggagcgagatggagactatggctcttatttgaactttttcttttttaaagatttatttattatacagcaacctgcctgcatatatcccgcaggccagaagagggcatcagatcccattacagatggttgtgagctaccttgtggttgctgggaattgaactcaggacctctggaagagcacactgttctctgacccatctctcaagccttatttgaactactaaatgtaaattctagacatttccactgagatattcttctgccttaagaattacagcaattcacaatcttaagtccctaataatagttttcaaatacctcaaggtagctaaatgtttgcactcaacttattctttccataaatgcttataggtgagtcttatcattataaattctcatgagagttttaaatagaagattaatgatacaaactctaatgcaattttgcacctttaaattttttggtaagattcacatgacagaaagattaccatctaaaccaatttaggtatgcaattcagtgataataaatgcactcataatatacagccactgtaatccacctccatacatttttttattggataaaattagaccacaccattaaacaaaaaatattcttcccaaaactatctacttaaacatttaaaaagatgtatttttacaattattgtgtgtctgtgagaatgtgtatttgtgtgtctctgtgtgtgtgagtgtgtctctgtgtatgtgagtgtgtgtgcgcgtgtgtgtgttttactcacagaagccatcagaggatgttggatctcttgcagctacagtgacaggcagtggaggaccatcttgtgtgagtgctgagaacctaactgagctctaagaaggcagtactcttaactgctgagcaagctctttggtccttgctaaagcacttttgtccaataagtatctgcctggttaccctttagtacctaggatttcctgtaaaggttttttagtagacagcagcaatgacctcaggacagggtagtgatgagtctgtactattgtaggtaacggaagagggaccttacatcctcccttagctcagctggggacttttgtgagggagataggaataaaattccctagcttttgtgtttcttatagcatgccaatcacagcaactttcacaatccagaataatcagtagaatgttcatttgtttttcttctttatgacaacttatgggtattggccaataatgcaaagttccaaccaaataattgccttctttttgcaaataagtatataacatttagtacagaaattgagattgtagcttaaaatatactttggagtcatttgagaatattaaggtttattgttaaattacctctcagataatattaccagctattaacacgtaagtaagatggacattagggtaagctgtatatttttgcatttgtattttatagacctggaaatctagtatctagtagtctttgctcacccgtggaggttaatacctataaaaataagcattctagtctccagcagttggcttcagtagaagtgttaaacatttattcacaaggtggctgtttagtagttgatactgggaagaggtaaatgggacaagtgttttgtgcagaagacagtctggggaagtacataagagtggtaataagatagatcatcatagtatggggcatatggcaggttatctgaaagtaatgttggacaccagtgaagatatctgtcctgacagaattgatatttaatttgtgttgttaaacaccgttggataacagttcttggtgacgtggtatcttggatgagtggtgaagatattggagacaagtgtacctgcgtgtataaagctccagtttgcgttaaatgtgccattgtggcagagtacctgacatggacatcttacagcttgacagtggaaggattttgtttggttacacttgcagagatccagtgcatgttcctgcatctcctgatttggctctagggagacagaacatatgggagcaggggtgtgacaacttacacacagtggacaagaagcagagagcctgagaggggccaaggacaagacacagttcctaaggacatgcctgagtttggcctggactcataagcttttcacagtcctccaatgtagtggcagcagctagaaagcaagccttcaatggcttgtattgatggcacgttatttaagcagtaacaagtctaagtgccacagtgcggtgatttttgtctttaaacattaattttagatacaggtggggtaaagtcagttaacatttatttttaatgaagacttggtagtactctcttctgctctcttttctatttggtagaagagtctactttcagcttttcaagcagtaacttctagatttcttcttcatcctcctagctctaagtaacatgcaaatattgtttatttttgcatgcatctctgtgtgtgtgtatgcttgtatgtgtgcacgtgcgagcatgtgtgcgagcatgcacaacattcatgtagaaccaagagggtaatttctgagactcagttctcttgtaccatgtggatcccagggatttcttggtcttcaggctgatggcaaacagctgtattcagtgaaccatcttgttgatcccgttttctacttaatttgagctttggtttctagtgttgctaagtcagttactacttaatttctcactttccaaatttgattacttttatctcttatagtattctttttgtgtttatgatcatgggtcttaaaaaaattctatactgtttcactggttttaaggagacaaatagtaaacatatttgtccaatctgatttggtcaactttaaaaagatgtcatcatagtgtttctaatattgcatagataagtgtagttggacaatgaacttcagaactcatgtatgtgaggtggatcaagaaggctaaagagcgtaatgttcaaaggatatgaatgataataaaaaaccccaaccccccagagcaggactgggaacactagtttggaatgggagtgatatcaggtcatggttaggggcatctattaacaatgaaaatggtgatcaaggcaggaattaaataaataccaggaagagaaacaattgggaaaactttttagtgtggcttgtgcaggtgcagcgtgagggcagggattcctcccagtgagggctgggatgtatattgttcccagttagacagttgctcatgtcacgtgagaaaggaaatgtatgaaaaggttggttgacaccactggttagggtgccttttagaccacgataccctgagttatttgacaggaaagaaagcatacaaagtaaatctctgttgcttttcccttagtttccttttcctcatgtttaactgtcgtgttctgacagttgtgtgagttttctcttggagatagttatgtgcatatactgtatatacagaatcataggtatctttaaattctttgctatggaattgttatatatatttctgttcctttaaatccaatatgtaattacttttgaaatttttgcatttctaacaacatggttattcatgactgcttagtattgttaaatatggaaatactatgatagcaatgaacaatttaggctgggctgatttcatacatgttatttagctgaatgagtttatatagtttaaaatatcagcgttactacttttctgtagtcgtagcatgaggggagacaaatatttcctctgtttttgagcattcctaatctaaaattcaaaatgctgcagagcagtaaactttttggcactgagttgttaccacaagtagagacttcccaattggcttgctaagcaatatagatacactaatgtattgaattacctttgggagatatgtataaggtatatatgaattataaattaattttatattgccatctgggttccattcccaagatattttatttatttgtaaccattctagaaaatgaaatttaaaattttaatttcttcttttctaaccatttcaaataaggaagactcaacctgaatgtgaaaaggcacagatacatctagccttggcattgccatctagacaggatgatagtattttgatttttacatttagtaataaatagatgtttctttgctagtataatgagggctatgttaagagaatatttattttatataaaataaattgttttctgaggcaggtaattgattggtggtaaggagggatcttagagtgtcttgtcataaatcgtatttatacttcctgtagggattaggagcagacagcaagaacctgtaccctttcctgctcccagttatccagctgagtacagatgtgtctcagcctccacatgtctatcttctggaagatggcctggagttatggtaagaggagaacttgatactgtggattcccctgctgctgctttctctgctttttttcagtagagcagaggtcacgtgtggctttgaatactcagataagcatgtggagttgttatcctctggttgtttccgcttctagctgctgttccctgtaggctcctgatagacagcttgtgagaaatgggtgtgttaagagcactgtcccctcttccagaggaggtccaggttctccacaccaccatgatagttcataacatctgtcactctagtcccaggggatctgacactcttttctgtccttcacaggcactgtatggacatggtgcacagacataaatacaaacaaaatacttaaaaca

SEQ ID NO: 3231 - DNA, 1602 bp, Mus musculus
cgtaattttagcgcgccctcgtcgtttggagtggcgacgcggaacatggcgcgttcctagaagccgttttcggcatcagtaggcggcagcgtgtggactaggagcgtgggggacgaggaagcaaccaacgccgcttcgtgtggacaagtggaaaggggcgggccgggcggttccggaccgaagcacgcggcttccatggatctcaatagtgccagctctgtggttcttcaggtcctaacacaggccaccagtcaggatactgctgtgttgaagccagccgaggagcaactgaaacagtgggagacacagccaggtttctattcagtgttgctgaatatttttacgaatcacacccttgatataaatgtacggtggcttgctgtgctgtattttaaacatgggattgatcgttactggaggcgtgtcgcaccgcatgctctctcagaagaggaaaagtcaacattgcgtgcagggctcatcaccaactttaatgaaccaataaaccagatcgcagtgctgattgccaaggttgctcggttagactgtcctaggcagtggccggagctcattcccactcttgtagagtctgtcaaagtccaggatgaccttcgccagcacagagctctgctgaccttctaccatgtcaccaagacgctggcatccaaacgcctggccgctgacagaaagctattctatgatttagcttctggaatttataattttgcctgttctctgtggaaccatcatacagacacatttctgcagcacgtttcttctggcaatgaagctgcggttctgagttcactagagcgaacactgctatcgttaaaagtgctgcggaagttaactgtgaatggatttgtggaacctcataagaatatggaggtgatgctcttggacttcttggatcaacaccccatttcatttactcctctaattcagaggtcactggaattttctgtaagctatgtttttactgaagttggtgaaggcgttacatttgagcgattcattgtccagtgcatgaatcttattaagatgattgtcaaaaattatgcttataagccatccaaaaattttgaagatagcagccctgaaacacttgaagcccataagattaagatggcattcttcacatatcccacgttgacagagatatgtcgacgattagtctctcattattttttattaacggaagaagaactgaccatgtgggaggaagatccagaaggctttacagtggaagaaacaggaggagactcttggaaatacagtttgaggccttgcactgaagtattatttatagatatattccacgaatataatcaaactcttactcctgtacttctagaaatgatgcaaactcttgaagtgtataatgctgtgggattagctgcttttgagctgtttgacagtgttgattttgatcagtggtttaaaacccaacttcttcccgaattacaagtttctcataataggcaatatctggaaaccatgttcacactgcttttccagttgctgcagcaggttacagagtgtgatacaaagatgcacgtgctgcacgtcctctcctgtgtgatcgaaagagtcaacgtgcaggtg

SEQ ID NO: 3232 - protein, 514 aa, Mus musculus
KPFSASVGGSVWTRSVGDEEATNAASCGQVERGGPGGSGPKHAASMDLNSASSVVLQVLTQATSQDTAVLKPAEEQLKQWETQPGFYSVLLNIFTNHTLDINVRWLAVLYFKHGIDRYWRRVAPHALSEEEKSTLRAGLITNFNEPINQIAVLIAKVARLDCPRQWPELIPTLVESVKVQDDLRQHRALLTFYHVTKTLASKRLAADRKLFYDLASGIYNFACSLWNHHTDTFLQHVSSGNEAAVLSSLERTLLSLKVLRKLTVNGFVEPHKNMEVMLLDFLDQHPISFTPLIQRSLEFSVSYVFTEVGEGVTFERFIVQCMNLIKMIVKNYAYKPSKNFEDSSPETLEAHKIKMAFFTYPTLTEICRRLVSHYFLLTEEELTMWEEDPEGFTVEETGGDSWKYSLRPCTEVLFIDIFHEYNQTLTPVLLEMMQTLEVYNAVGLAAFELFDSVDFDQWFKTQLLPELQVSHNRQYLETMFTLLFQLLQQVTECDTKMHVLHVLSCVIERVNVQV
